(19) United States
(12) Patent Application Publication
(10) Pub. No.: US 2024/0124882 A1
(43) Pub. Date: Apr. 18, 2024

(54) PRION PROTEIN (PRNP) IRNA COMPOSITIONS AND METHODS OF USE THEREOF

(71) Applicant: Alnylam Pharmaceuticals, Inc., Cambridge, MA (US)

(72) Inventors: Haiyan Peng, Medford, MA (US); Bret Lee Bostwick, Cambridge, MA (US); James D. McIninch, Burlington, MA (US); Mark K. Schlegel, Boston, MA (US); Adam Castoreno, Framingham, MA (US); Tuyen M. Nguyen, Milton, MA (US)

(21) Appl. No.: 18/236,437

(22) Filed: Aug. 22, 2023

Related U.S. Application Data
(63) Continuation of application No. PCT/US2022/017690, filed on Feb. 24, 2022.
(60) Provisional application No. 63/153,411, filed on Feb. 25, 2021.

(51) Int. Cl. C12N 15/113

(52) U.S. Cl. CPC C12N 15/1138; C12N 2310/14; C12N 2310/315; C12N 2310/3515; C12N 2320/30

(57) ABSTRACT

The disclosure relates to double stranded ribonucleic acid (dsRNAi) agents and compositions targeting a prion protein (PRNP) gene, as well as methods of inhibiting expression of a PRNP gene and methods of treating subjects having a PRNP-associated disease or disorder, e.g., Prion diseases, using such dsRNAi agents and compositions.

### RELATED APPLICATIONS

[0001] This application is a 35 § U.S.C. 111(a) continuation application which claims the benefit of priority to PCT/US2022/017690, filed on Feb. 24, 2022, which, in turn, claims the benefit of priority to U.S. Provisional Application No. 63/153,411 filed on Feb. 25, 2021. The entire contents of each of the foregoing applications are incorporated herein by reference.

### SEQUENCE LISTING

[0002] The application contains a Sequence Listing which has been submitted electronically in .XML format and is hereby incorporated by reference in its entirety. Said .XML copy, created on Dec. 1, 2023, is named “121301_3902_SL.xml” and is 4,003,195 bytes in size. The sequence listing contained in this .XML file is part of the specification and is hereby incorporated by reference herein in its entirety.

### BACKGROUND OF THE INVENTION

[0003] Prion diseases, or transmissible spongiform encephalopathies (TSEs), are a group of neurodegenerative disorders that affect both humans and animals. Prion disease typically progresses quickly with rapid cognitive decline, and is fatal within a few months of symptoms onset. Prion disease is caused by misfolding of the cellular prion protein highly expressed in neuronal and glial cells, PrP^{C}, into an autocatalytically self-propagating conformer called the scrapie prion protein, or PrPs®, which is insoluble and relatively resistant to degradation by proteases. The accumulation of PrP^{Sc} lead to neurodegeration and/or neuronal injury and loss.

[0004] There are three different subtypes of prion disease categorized by how the disease is contracted: sporadic, genetic and acquired. Inherent mutations in the prion protein gene (PRNP) cause the genetic subtype of prion disease, such as, Creutzfeldt-Jakob Disease (CJD), Gerstmann-Straussler-Scheinker Disease (GSS), and Fatal Familial Insomnia (FFI). More than 60 variants of PRNP have been identified. In pateints with genetic prion diseases, the mutations in the PRNP gene cause the cells to produce PrP^{Sc}, The acquired subtype of prion disease is casued by prion proteins and included Mad Cow Disease and Kuru. The sporadic subtype of prion disease is caused by unknown factors and accounts for approximately 85% of all prion disease.

[0005] Previous studies have shown that homozygous deletion of PrP prevents prion infection in mice and goats (Büeler H., Aguzzi A., et al. Cell. 1993; 73:1339-1347; Salvesen Ø., et al. Vet. Res. 2020; 51:1), while heterozygous PrP knockout delays development of disease following prion infection (Salvesen Ø, et al. Vet. Res. 2020; 51:1; Bdeler H., et al. Mol. Med. 1994; 1:19-30; Prusiner S. B., et al. Proc. Natl. Acad. Sci. U.S.A. 1993; 90:10608-10612; Sakaguchi S., et al. J. Virol. 1995; 69:7586-7592) and transgenic PrP overexpression accelerates it (Fischer M., et al. EMBO J. 1996; 15:1255-1264), providing genetic evidence of a dose-response relationship between PrP dosage and disease susceptibility. Conditional knockout systems have confirmed that post-natal depletion provides a significant survival benefit (Mallucci G., et al. Science. 2003; 302:871-874; Safar J. G., et al. J. Gen. Virol. 2005; 86:2913-2923). Knockout animals are healthy (Büeler H., et al. Nature. 1992; 356:577-582; Richt J. A., et al. Nat. Biotechnol. 2007; 25:132-138; Benestad S. L., et al. Vet. Res. 2012; 43:87). Furthermore, heterozygous inactivating mutations also appear to be tolerated in humans (Minikel E. V., et al. Sci. Transl. Med. 2016; 8:322ra9; Minikel E. V., et al. Nature. 2020; 581:459-464), minimizing any concern about on-target toxicity of pharmacologic PrP lowering.

[0006] Effective treatments for PRNP-associated diseases, such as prion diseases, are currently not available and any treatments that are available are palliative. Thus, there remains a need for agents that can selectively and efficiently silence the PRNP gene using the cell's own RNAi machinery that have both high biological activity and in vivo stability, and that can effectively inhibit expression of a target PRNP gene.

### BRIEF SUMMARY OF THE INVENTION

[0007] The present disclosure provides RNAi agent compositions which effect the RNA-induced silencing complex (RISC)-mediated cleavage of RNA transcripts of a prion protein (PRNP) gene. The PRNP gene may be within a cell, e.g., a cell within a subject, such as a human. The present disclosure also provides methods of using the RNAi agent compositions of the disclosure for inhibiting the expression of a PRNP gene or for treating a subject who would benefit from inhibiting or reducing the expression of a PRNP gene, e.g., a subject suffering or prone to suffering from a PRNP-associated disease, e.g., a prion disease, such as a genetic prion disease, e.g., familial Creutzfeldt-Jakob disease (CJD), Gerstmann-Straussler-Scheinker syndrome (GSS), and fatal familial insomnia (FFI); a sporadic prion disease, e.g., sporadic Creutzfeldt-Jakob disease, Sporadic Fatal Insomnia (sFI), and Variably Proteinase-Sensitive Prionopathy (VPSPr), or an acquired prion disease, e.g., Iatrogenic CJD (iCJD), Kuru, and Variant CJD (vCJD).

[0008] Accordingly, in one aspect, the instant disclosure provides a double stranded ribonucleic acid (RNAi) agent for inhibiting expression of a PRNP gene, wherein the dsRNA agent comprises a sense strand and an antisense strand forming a double stranded region, wherein the sense strand comprises at least 15, e.g., 15, 16, 17, 18, 19, 20, or 21, contiguous nucleotides differing by no more than 0, 1, 2, or 3 nucleotides from the nucleotide sequence of SEQ ID NO:1 and the antisense strand comprises at least 15, e.g., 15, 16, 17, 18, 19, 20, or 21, contiguous nucleotides differing by no more than 1, 2, or 3 nucleotides from the nucleotide sequence of SEQ ID NO:5, and wherein the sense strand, the antisense strand, or both the sense strand and the antisense strand is conjugated to one or more lipophilic moieties.

[0009] In certain embodiments, the sense strand comprises at least 15 contiguous nucleotides of the nucleotide sequence of SEQ ID NO:1 and the antisense strand comprises at least 15 contiguous nucleotides of the nucleotide sequence of SEQ ID NO:5. In certain embodiments, the sense strand comprises at least 17 contiguous nucleotides of the nucleotide sequence of SEQ ID NO:1 and the antisense strand comprises at least 17 contiguous nucleotides of the nucleotide sequence of SEQ ID NO:5. In certain embodiments, the sense strand comprises at least 19 contiguous nucleotides of the nucleotide sequence of SEQ ID NO:1 and the antisense strand comprises at least 19 contiguous nucleotides of the nucleotide sequence of SEQ ID NO:5.

[0010] In some embodiments, the nucleotide sequence of the sense strand comprises any one of the sense strand nucleotide sequences in any one of Tables 2-3.

[0011] In another aspect, the instant disclosure provides a double stranded ribonucleic acid (RNAi) agent for inhibiting expression of a PRNP gene, where the RNAi agent includes a sense strand and an antisense strand forming a double stranded region, wherein the antisense strand comprises a region of complementarity to an mRNA encoding PRNP, and wherein the region of complementarity comprises at least 15, e.g., 15, 16, 17, 18, 19, 20, or 21, contiguous nucleotides differing by no more than 3 nucleotides (i.e., differing by 3, 2, 1, or 0 nucleotides) from any one of the antisense sequences listed in any one of Table 2-3, and wherein the sense strand, the antisense strand, or both the sense strand and the antisense strand is conjugated to one or more lipophilic moieties.

[0012] In certain embodiments, the antisense strand includes a region of complementarity which includes at least 15 contiguous nucleotides of any one of the antisense sequences listed in any one of Table 2-3. In certain embodiments, the antisense strand includes a region of complementarity which includes at least 17 contiguous nucleotides of any one of the antisense sequences listed in any one of Table 2-3. In certain embodiments, the antisense strand includes a region of complementarity which includes at least 19 contiguous nucleotides of any one of the antisense sequences listed in any one of Tables 2-3. In certain embodiments, the antisense strand includes a region of complementarity which includes at least 20 contiguous nucleotides of any one of the antisense sequences listed in any one of Table 2-3. In certain embodiments, the antisense strand includes a region of complementarity which includes at least 21 contiguous nucleotides of any one of the antisense sequences listed in any one of Table 2-3. In certain embodiments, thymine-to-uracil or uracil-to-thymine differences between aligned (compared) sequences are not counted as nucleotides that differ between the aligned (compared) sequences.

[0013] In one aspect, the present invention provides a double stranded ribonucleic acid (dsRNA) agent for inhibiting expression of prion protein (PRNP) in a cell, wherein the dsRNA agent comprises a sense strand and an antisense strand forming a double stranded region, wherein the sense strand comprises at least 15, e.g., 15, 16, 17, 18, 19, 20, or 21, contiguous nucleotides differing by no more than three nucleotides from any one of the nucleotide sequence of nucleotides 502-524, 507-529, 502-529, 540-562, 566-588, 575-597, 576-598, 589-611, 575-611, 593-615, 594-616, 600-622, 593-622, 650-672, 858-880, 976-998, 1100-1122, 1126-1148, 1220-1242, 1221-1243, 1220-1243, 1304-1326, 1328-1350, 1410-1432, 1445-1467, 1481-1503, 1532-1554, 1610-1632, 1615-1637, 1617-1639, 1621-1643, 1610-1643, 1610-1639, 1688-1710, 1694-1714, 1830-1852, 1831-1853, 1854-1876, 1830-1853, 1872-1894, 1873-1895, 1938-1960, 2011-2033, 2015-2037, 2031-2053, 2034-2056, 2069-2091, 2076-2098, 2077-2099, 1872-1895, 2011-2037, 2069-2099, 2079-2101, 2031-2056, 2069-2098, 2138-2160, 2143-2165, 2158-2180, 2167-2189, 2168-2190, 2170-2192, 2174-2196, 2175-2197, 2177-2199, 2185-2207, 2189-2211, 2196-2218, 2200-2222, 2202-2224, 2221-2243, 2222-2244, 2223-2245, 2238-2260, 2241-2263, 2242-2264, 2138-2264, 2257-2358, 2174-2245, 2174-2224, 2138-2196, 2177-2224, 2223-2245, 2138-2189, 2177-2211, 2196-2224, 2257-2279, 2258-2280, 2335-2537, 2336-2358, 2257-2358, 2342-2364, 2397-2419, 2398-2420, 2399-2421, 2400-2422, 2401-2423, 2404-2426, 2397-2426, 2394-2423, 2397-2421, 2399-2426, and 2398-2421 of SEQ ID NO: 1, and the antisense strand comprises at least 15, e.g., 15, 16, 17, 18, 19, 20, or 21, contiguous nucleotides from the corresponding nucleotide sequence of SEQ ID NO:5, and wherein the sense strand, the antisense strand, or both the sense strand and the antisense strand is conjugated to one or more lipophilic moieties.

[0014] In one aspect, the present invention provides a double stranded ribonucleic acid (dsRNA) agent for inhibiting expression of prion protein (PRNP) in a cell, wherein the dsRNA agent comprises a sense strand and an antisense strand forming a double stranded region, wherein the sense strand comprises at least 15, e.g., 15, 16, 17, 18, 19, 20, or 21, contiguous nucleotides differing by no more than three nucleotides from any one of the nucleotide sequence of nucleotides 530-570, 535-565, 539-561, 540-562, 555-605, 560-605, 560-600, 566-588, 567-589, 568-590, 569-591, 570-592, 575-597, 580-620-585-620, 589-611, 590-612, 591-613, 592-614, 593-615, 594-616, 600-650, 610-650, 613-635, 614-636, 615-637, 616-638, 617-639, 618-640, 640-680, 649-671, 650-672, 651-673, 670-700, 674-696, 675-697, 795-830, 804-826, 2325-2375, 2325-2370, 2330-2370, 2335-2357, 2336-2358, 2337-2359, 2338-2360, 2339-2361, or 2340-2362 of SEQ ID NO: 1, and the antisense strand comprises at least 15, e.g., 15, 16, 17, 18, 19, 20, or 21, contiguous nucleotides from the corresponding nucleotide sequence of SEQ ID NO:5, and wherein the sense strand, the antisense strand, or both the sense strand and the antisense strand is conjugated to one or more lipophilic moieties.

[0015] In one aspect, the present invention provides a double stranded ribonucleic acid (dsRNA) agent for inhibiting expression of prion protein (PRNP) in a cell, wherein the dsRNA agent comprises a sense strand and an antisense strand forming a double stranded region, wherein the sense strand comprises at least 15, e.g., 15, 16, 17, 18, 19, 20, or 21, contiguous nucleotides differing by no more than three nucleotides from any one of the nucleotide sequence of nucleotides 502-524, 540-562, 589-611, 594-616, 650-672, 1445-1467, 1688-1710, 2011-2033, 2031-2053, 2185-2207, 2222-2244, 2336-2358, 2339-2361, 2399-2421 or 2258-2280 of SEQ ID NO: 1, and the antisense strand comprises at least 15 contiguous nucleotides from the corresponding nucleotide sequence of SEQ ID NO:5, and wherein the sense strand, the antisense strand, or both the sense strand and the antisense strand is conjugated to one or more lipophilic moieties.

[0016] In some embodiments, the antisense strand comprises at least 15, e.g., 15, 16, 17, 18, 19, 20, or 21, contiguous nucleotides differing by no more than three nucleotides from any one of the antisense strand nucleotide sequences of a duplex selected from the group consisting of AD-1070511, AD-1070462, AD-1070553, AD-1072048, AD-1070516 and AD-1072050, AD-1071769, AD-1071949, AD-1070444, AD-1071505, AD-1071912, AD-1071789, AD-1071265, AD-1072084, and AD-1071985.

[0017] In some embodiments, the lipophilic moiety is conjugated via a linker or a carrier.

[0018] The sense strand, the antisense strand, or both the sense strand and the antisense strand may be conjugated to one or more lipophilic moieties. In some embodiments, the lipophilic moiety is conjugated to one or more internal positions in the double stranded region of the dsRNA agent, e.g., the one or more lipophilic moieties may be conjugated to one or more internal positions on the antisense strand. In some embodiments, the one or more lipophilic moieties are conjugated to one or more internal positions on at least one strand via a linker or carrier.

[0019] In some embodiments, lipophilicity of the lipophilic moiety, measured by log Kow, exceeds 0.

[0020] In some embodiments, the hydrophobicity of the dsRNA agent, measured by the unbound fraction in a plasma protein binding assay of the dsRNA agent, exceeds 0.2. In some embodiments, the plasma protein binding assay is an electrophoretic mobility shift assay using human serum albumin protein.

[0021] In some embodiments, the internal positions include all positions except the terminal two positions from each end of the sense strand or the antisense strand. In other embodiments, the internal positions include all positions except the terminal three positions from each end of the sense strand or the antisense strand.

[0022] In some embodiments, the internal positions exclude a cleavage site region of the sense strand, e.g., the internal positions include all positions except positions 9-12, counting from the 5′-end of the sense strand or the internal positions include all positions except positions 11-13, counting from the 3′-end of the sense strand.

[0023] In some embodiments, the internal positions exclude a cleavage site region of the antisense strand. In other embodiments, the internal positions include all positions except positions 12-14, counting from the 5′-end of the antisense strand. In some embodiments, the internal positions include all positions except positions 11-13 on the sense strand, counting from the 3′-end, and positions 12-14 on the antisense strand, counting from the 5′-end.

[0024] In some embodiments, the one or more lipophilic moieties are conjugated to one or more of the internal positions selected from the group consisting of positions 4-8 and 13-18 on the sense strand, and positions 6-10 and 15-18 on the antisense strand, counting from the 5′end of each strand.

[0025] In some embodiments, the one or more lipophilic moieties are conjugated to one or more of the internal positions selected from the group consisting of positions 5, 6, 7, 15, and 17 on the sense strand, and positions 15 and 17 on the antisense strand, counting from the 5′-end of each strand.

[0026] In some embodiments, the positions in the double stranded region exclude a cleavage site region of the sense strand.

[0027] In some embodiments, the sense strand is 21 nucleotides in length, the antisense strand is 23 nucleotides in length, and the lipophilic moiety is conjugated to position 20, position 15, position 1, position 7, position 6, or position 2 of the sense strand or position 16 of the antisense strand.

[0028] In other embodiments, the sense strand is 21 nucleotides in length, the antisense strand is 23 nucleotides in length, and the lipophilic moiety is conjugated to position 21, position 20, position 15, position 1, position 7, position 6, or position 2 of the sense strand or position 16 of the antisense strand.

[0029] In some embodiments, the lipophilic moiety is an aliphatic, alicyclic, or polyalicyclic compound.

[0030] In some embodiments, the lipophilic moiety is selected from the group consisting of lipid, cholesterol, retinoic acid, cholic acid, adamantane acetic acid, 1-pyrene butyric acid, dihydrotestosterone, 1,3-bis-O(hexadecyl)glycerol, geranyloxyhexyanol, hexadecylglycerol, borneol, menthol, 1,3-propanediol, heptadecyl group, palmitic acid, myristic acid, 03-(oleoyl)lithocholic acid, 03-(oleoyl)cholenic acid, dimethoxytrityl, or phenoxazine.

[0031] In some embodiments, the lipophilic moiety is selected from the group consisting of cholesterol, lithocholic acid (LCA), eicosapentaenoic acid (EPA), docosahexaenoic acid (DHA), docosanoic acid (DCA), choline, vitamin A, vitamin E, retinoic acid, and alpha-tocopheryl succinate. In some embodiments, the lipophilic moiety is selected from the group consisting of eicosapentaenoic acid (EPA), docosahexaenoic acid (DHA), and docosanoic acid (DCA). In some embodiments, the lipophilic moiety is not cholesterol.

[0032] In some embodiments, the lipophilic moiety contains a saturated or unsaturated C4-C30 hydrocarbon chain, and an optional functional group selected from the group consisting of hydroxyl, amine, carboxylic acid, sulfonate, phosphate, thiol, azide, and alkyne.

[0033] In some embodiments, the lipophilic moiety contains a saturated or unsaturated C6-C18 hydrocarbon chain.

[0034] In some embodiments, the lipophilic moiety contains a saturated or unsaturated C16 hydrocarbon chain. In some embodiments, the saturated or unsaturated C16 hydrocarbon chain is conjugated to position 6, counting from the 5′-end of the strand.

[0035] In some embodiments, the lipophilic moiety is conjugated via a carrier that replaces one or more nucleotide(s) in the internal position(s) or the double stranded region. In some embodiments, the carrier is a cyclic group selected from the group consisting of pyrrolidinyl, pyrazolinyl, pyrazolidinyl, imidazolinyl, imidazolidinyl, piperidinyl, piperazinyl, [1,3]dioxolanyl, oxazolidinyl, isoxazolidinyl, morpholinyl, thiazolidinyl, isothiazolidinyl, quinoxalinyl, pyridazinonyl, tetrahydrofuranyl, and decalinyl; or is an acyclic moiety based on a serinol backbone or a diethanolamine backbone.

[0036] In some embodiments, the lipophilic moiety is conjugated to the dsRNA agent via a linker containing an ether, thioether, urea, carbonate, amine, amide, maleimide-thioether, disulfide, phosphodiester, sulfonamide linkage, a product of a click reaction, or carbamate.

[0037] In some embodiments, the lipophilic moiety is conjugated to a nucleobase, sugar moiety, or internucleosidic linkage.

[0038] In some embodiments, the dsRNA agent comprises at least one modified nucleotide. In some embodiments, no more than five of the sense strand nucleotides and no more than five of the nucleotides of the antisense strand are unmodified nucleotides. In other embodiments, all of the nucleotides of the sense strand and all of the nucleotides of the antisense strand comprise a modification.

[0039] In some embodiments, at least one of the modified nucleotides is selected from the group a deoxy-nucleotide, a 3′-terminal deoxythimidine (dT) nucleotide, a 2′-O-methyl modified nucleotide, a 2′-fluoro modified nucleotide, a 2′-deoxy-modified nucleotide, a locked nucleotide, an unlocked nucleotide, a conformationally restricted nucleotide, a constrained ethyl nucleotide, an abasic nucleotide, a 2′-amino-modified nucleotide, a 2′-O-allyl-modified nucleotide, 2′-C-alkyl-modified nucleotide, 2′-hydroxly-modified nucleotide, a 2′-methoxyethyl modified nucleotide, a 2′-O-alkyl-modified nucleotide, a morpholino nucleotide, a phosphoramidate, a non-natural base comprising nucleotide, a tetrahydropyran modified nucleotide, a 1,5-anhydrohexitol modified nucleotide, a cyclohexenyl modified nucleotide, a nucleotide comprising a 5′-phosphorothioate group, a nucleotide comprising a 5′-methylphosphonate group, a nucleotide comprising a 5′ phosphate or 5′ phosphate mimic, a nucleotide comprising vinyl phosphonate, a glycol nucleic acid (GNA) or a glycol nucleic acid S-isomer (S-GNA) (e.g., a nucleotide comprising adenosine-glycol nucleic acid (GNA) ora nucleotide comprising thymidine-glycol nucleic acid (GNA)S-Isomer), a nucleotide comprising 2-hydroxymethyl-tetrahydrofurane-5-phosphate, a nucleotide comprising 2′-deoxythymidine-3′phosphate, a nucleotide comprising 2′-deoxyguanosine-3′-phosphate, and a terminal nucleotide linked to a cholesteryl derivative and a dodecanoic acid bisdecylamide group; and combinations thereof.

[0040] In other embodiments, the modified nucleotide is selected from the group consisting of a 2′-deoxy-2′-fluoro modified nucleotide, a 2′-deoxy-modified nucleotide, 3′-terminal deoxythimidine nucleotides (dT), a locked nucleotide, an abasic nucleotide, a 2′-amino-modified nucleotide, a 2′-alkyl-modified nucleotide, a morpholino nucleotide, a phosphoramidate, and a non-natural base comprising nucleotide.

[0041] In some embodiments, at least one of the modified nucleotides is selected from the group consisting of a deoxy-nucleotide, a 2′-O-methyl modified nucleotide, a 2′-fluoro modified nucleotide, a 2′-deoxy-modified nucleotide, a glycol modified nucleotide (GNA), and a vinyl-phosphonate nucleotide; and combinations thereof.

[0042] In some embodiments, at least one of the modifications on the nucleotides is a thermally destabilizing nucleotide modification. In some embodiments, the thermally destabilizing nucleotide modification is selected from the group consisting of an abasic modification; a mismatch with the opposing nucleotide in the duplex; and destabilizing sugar modification, a 2′-deoxy modification, an acyclic nucleotide, an unlocked nucleic acids (UNA), and a glycerol nucleic acid (GNA)

[0043] In some embodiments, the modified nucleotide comprises a short sequence of 3′-terminal deoxythimidine nucleotides (dT).

[0044] In some embodiments, the modifications on the nucleotides are 2′-O-methyl, GNA and 2′fluoro modifications.

[0045] In some embodiments, the dsRNA agent further comprises at least one phosphorothioate internucleotide linkage. In some embodiments, the dsRNA agent comprises 6-8 phosphorothioate internucleotide linkages. In one embodiment, the phosphorothioate or methylphosphonate internucleotide linkage is at the 3′-terminus of one strand. Optionally, the strand is the antisense strand. In another embodiment, the strand is the sense strand. In a related embodiment, the phosphorothioate or methylphosphonate internucleotide linkage is at the 5′-terminus of one strand. Optionally, the strand is the antisense strand. In another embodiment, the strand is the sense strand. In another embodiment, the phosphorothioate or methylphosphonate internucleotide linkage is at the both the 5′- and 3′-terminus of one strand. Optionally, the strand is the antisense strand. In another embodiment, the strand is the sense strand.

[0046] In some embodiments, each strand is no more than 30 nucleotides in length.

[0047] In some embodiments, at least one strand comprises a 3′ overhang of at least 1 nucleotide or a 3′ overhang of at least 2 nucleotides.

[0048] The double stranded region may be 15-30 nucleotide pairs in length; 17-23 nucleotide pairs in length; 17-25 nucleotide pairs in length; 23-27 nucleotide pairs in length; 19-21 nucleotide pairs in length; or 21-23 nucleotide pairs in length.

[0049] Each strand may be 19-30 nucleotides; 19-23 nucleotides; or 21-23 nucleotides.

[0050] In some embodiments, the dsRNA agent further comprises a targeting ligand that targets a liver tissue. In some embodiments, the targeting ligand is a GalNAc conjugate.

[0051] In certain embodiments, the double-stranded RNAi agent further includes a targeting ligand that targets a receptor which mediates delivery to a CNS tissue, e.g., a hydrophilic ligand.

[0052] In certain embodiments, the targeting ligand is a C16 ligand. In one embodiment, the ligand is conjugated at the 2′-position of a nucleotide or modified nucleotide within the sense or antisense strand. For example, a C16 ligand may be conjugated as shown in the following structure:

[chemical structure]

where * denotes a bond to an adjacent nucleotide, and B is a nucleobase or a nucleobase analog, optionally where B is adenine, guanine, cytosine, thymine or uracil.

[0053] In some embodiments, the lipophilic moeity or targeting ligand is conjugated via a bio-clevable linker selected from the group consisting of DNA, RNA, disulfide, amide, funtionalized monosaccharides or oligosaccharides of galactosamine, glucosamine, glucose, galactose, mannose, and combinations thereof.

[0054] In some embodiments, the 3′ end of the sense strand is protected via an end cap which is a cyclic group having an amine, said cyclic group being selected from the group consisting of pyrrolidinyl, pyrazolinyl, pyrazolidinyl, imidazolinyl, imidazolidinyl, piperidinyl, piperazinyl, [1,3]dioxolanyl, oxazolidinyl, isoxazolidinyl, morpholinyl, thiazolidinyl, isothiazolidinyl, quinoxalinyl, pyridazinonyl, tetrahydrofuranyl, and decalinyl.

[0055] In some embodiments, the dsRNA agent further comprises a terminal, chiral modification occurring at the first internucleotide linkage at the 3′ end of the antisense strand, having the linkage phosphorus atom in Sp configuration, a terminal, chiral modification occurring at the first internucleotide linkage at the 5′ end of the antisense strand, having the linkage phosphorus atom in Rp configuration, and a terminal, chiral modification occurring at the first internucleotide linkage at the 5′ end of the sense strand, having the linkage phosphorus atom in either Rp configuration or Sp configuration.

[0056] In some embodiments, the dsRNA agent further comprises a terminal, chiral modification occurring at the first and second internucleotide linkages at the 3′ end of the antisense strand, having the linkage phosphorus atom in Sp configuration, a terminal, chiral modification occurring at the first internucleotide linkage at the 5′ end of the antisense strand, having the linkage phosphorus atom in Rp configuration, and a terminal, chiral modification occurring at the first internucleotide linkage at the 5′ end of the sense strand, having the linkage phosphorus atom in either Rp or Sp configuration.

[0057] In some embodiments, the dsRNA agent further comprises a terminal, chiral modification occurring at the first, second and third internucleotide linkages at the 3′ end of the antisense strand, having the linkage phosphorus atom in Sp configuration, a terminal, chiral modification occurring at the first internucleotide linkage at the 5′ end of the antisense strand, having the linkage phosphorus atom in Rp configuration, and a terminal, chiral modification occurring at the first internucleotide linkage at the 5′ end of the sense strand, having the linkage phosphorus atom in either Rp or Sp configuration.

[0058] In some embodiments, the dsRNA agent further comprises a terminal, chiral modification occurring at the first, and second internucleotide linkages at the 3′ end of the antisense strand, having the linkage phosphorus atom in Sp configuration, a terminal, chiral modification occurring at the third internucleotide linkages at the 3′ end of the antisense strand, having the linkage phosphorus atom in Rp configuration, a terminal, chiral modification occurring at the first internucleotide linkage at the 5′ end of the antisense strand, having the linkage phosphorus atom in Rp configuration, and a terminal, chiral modification occurring at the first internucleotide linkage at the 5′ end of the sense strand, having the linkage phosphorus atom in either Rp or Sp configuration.

[0059] In some embodiments, the dsRNA agent further comprises a terminal, chiral modification occurring at the first, and second internucleotide linkages at the 3′ end of the antisense strand, having the linkage phosphorus atom in Sp configuration, a terminal, chiral modification occurring at the first, and second internucleotide linkages at the 5′ end of the antisense strand, having the linkage phosphorus atom in Rp configuration, and a terminal, chiral modification occurring at the first internucleotide linkage at the 5′ end of the sense strand, having the linkage phosphorus atom in either Rp or Sp configuration.

[0060] In some embodiments, the dsRNA agent further comprises a phosphate or phosphate mimic at the 5′-end of the antisense strand. In some embodiments, the phosphate mimic is a 5′-vinyl phosphonate (VP). When the phosphate mimic is a 5′-vinyl phosphonate (VP), the 5′-terminal nucleotide can have the following structure,

[chemical structure]

[0061] wherein * indicates the location of the bond to 5′-position of the adjacent nucleotide;

[0062] R is hydrogen, hydroxy, methoxy, fluoro, or another 2′-modification described herein (e.g., hydroxy or methoxy); and

[0063] B is a nucleobase or a modified nucleobase, optionally where B is adenine, guanine, cytosine, thymine or uracil.

[0064] In some embodiments, the base pair at the 1 position of the 5′-end of the antisense strand of the duplex is an AU base pair.

[0065] In some embodiments, the sense strand has a total of 21 nucleotides and the antisense strand has a total of 23 nucleotides.

[0066] In one embodiment, the dsRNA agent comprises at least one modified nucleotide.

[0067] In one embodiment, substantially all of the nucleotides of the sense strand; substantially all of the nucleotides of the antisense strand comprise a modification; or substantially all of the nucleotides of the sense strand and substantially all of the nucleotides of the antisense strand comprise a modification.

[0068] In one embodiment, all of the nucleotides of the sense strand comprise a modification; all of the nucleotides of the antisense strand comprise a modification; or all of the nucleotides of the sense strand and all of the nucleotides of the antisense strand comprise a modification.

[0069] In one embodiment, at least one of the modified nucleotides is selected from the group consisting of a deoxy-nucleotide, a 3′-terminal deoxythimidine (dT) nucleotide, a 2′-O-methyl modified nucleotide, a 2′-fluoro modified nucleotide, a 2′-deoxy-modified nucleotide, a locked nucleotide, an unlocked nucleotide, a conformationally restricted nucleotide, a constrained ethyl nucleotide, an abasic nucleotide, a 2′-amino-modified nucleotide, a 2′-O-allyl-modified nucleotide, 2′-C-alkyl-modified nucleotide, a 2′-methoxyethyl modified nucleotide, a 2′-O-alkyl-modified nucleotide, a morpholino nucleotide, a phosphoramidate, a non-natural base comprising nucleotide, a tetrahydropyran modified nucleotide, a 1,5-anhydrohexitol modified nucleotide, a cyclohexenyl modified nucleotide, a nucleotide comprising a phosphorothioate group, a nucleotide comprising a methylphosphonate group, a nucleotide comprising a 5′-phosphate, a nucleotide comprising a 5′-phosphate mimic, a thermally destabilizing nucleotide, a glycol modified nucleotide (GNA), and a 2-O—(N-methylacetamide) modified nucleotide; and combinations thereof.

[0070] In one embodiment, the modifications on the nucleotides are selected from the group consisting of LNA, glycol nucleic acid (GNA), hexitol nucleic acid (HNA), 2′-methoxyethyl, 2′-O-alkyl, 2′-O-allyl, 2′-C-allyl, 2′-fluoro, 2′-deoxy, 2′-hydroxyl, and glycol; and combinations thereof.

[0071] In one embodiment, at least one of the modified nucleotides is selected from the group consisting of a deoxy-nucleotide, a 2′-O-methyl modified nucleotide, a 2′-fluoro modified nucleotide, a 2′-deoxy-modified nucleotide, a glycol modified nucleotide (GNA), e.g., Ggn, Cgn, Tgn, or Agn, and, a vinyl-phosphonate nucleotide; and combinations thereof.

[0072] In another embodiment, at least one of the modifications on the nucleotides is a thermally destabilizing nucleotide modification.

[0073] In one embodiment, the thermally destabilizing nucleotide modification is selected from the group consisting of an abasic modification; a mismatch with the opposing nucleotide in the duplex; and destabilizing sugar modification, a 2′-deoxy modification, an acyclic nucleotide, an unlocked nucleic acid (UNA), and a glycerol nucleic acid (GNA).

[0074] The double stranded region may be 19-30 nucleotide pairs in length; 19-25 nucleotide pairs in length; 19-23 nucleotide pairs in length; 23-27 nucleotide pairs in length; or 21-23 nucleotide pairs in length.

[0075] In one embodiment, each strand is independently no more than 30 nucleotides in length.

[0076] In one embodiment, the sense strand is 21 nucleotides in length and the antisense strand is 23 nucleotides in length.

[0077] The region of complementarity may be at least 17 nucleotides in length; 19-23 nucleotides in length; or 19 nucleotides in length.

[0078] In one embodiment, at least one strand comprises a 3′ overhang of at least 1 nucleotide. In another embodiment, at least one strand comprises a 3′ overhang of at least 2 nucleotides.

[0079] In one embodiment, the dsRNA agent further comprises a ligand.

[0080] In one embodiment, the ligand is conjugated to the 3′ end of the sense strand of the dsRNA agent.

[0081] In one embodiment, the ligand is an N-acetylgalactosamine (GalNAc) derivative.

[0082] In one embodiment, the ligand is one or more GalNAc derivatives attached through a monovalent, bivalent, or trivalent branched linker.

[0083] In one embodiment, the ligand is

[chemical structure]

[0084] In one embodiment, the dsRNA agent is conjugated to the ligand as shown in the following schematic

[chemical structure]

and, wherein X is O or S.

[0085] In one embodiment, the X is O.

[0086] In one embodiment, the dsRNA agent further comprises at least one phosphorothioate or methylphosphonate internucleotide linkage.

[0087] In one embodiment, the phosphorothioate or methylphosphonate internucleotide linkage is at the 3′-terminus of one strand, e.g., the antisense strand or the sense strand.

[0088] In another embodiment, the phosphorothioate or methylphosphonate internucleotide linkage is at the 5′-terminus of one strand, e.g., the antisense strand or the sense strand.

[0089] In one embodiment, the phosphorothioate or methylphosphonate internucleotide linkage is at the both the 5′- and 3′-terminus of one strand. In one embodiment, the strand is the antisense strand.

[0090] In one embodiment, the base pair at the 1 position of the 5′-end of the antisense strand of the duplex is an AU base pair.

[0091] The present invention also provides cells containing any of the dsRNA agents of the invention and pharmaceutical compositions comprising any of the dsRNA agents of the invention.

[0092] The pharmaceutical composition of the invention may include dsRNA agent in an unbuffered solution, e.g., saline or water, or the pharmaceutical composition of the invention may include the dsRNA agent is in a buffer solution, e.g., a buffer solution comprising acetate, citrate, prolamine, carbonate, or phosphate or any combination thereof; or phosphate buffered saline (PBS).

[0093] In one aspect, the present invention provides a method of inhibiting expression of a PRNP gene in a cell. The method includes contacting the cell with any of the dsRNAs of the invention or any of the pharmaceutical compositions of the invention, thereby inhibiting expression of the PRNP gene in the cell.

[0094] In one embodiment, the cell is within a subject, e.g., a human subject, e.g., a subject having a PRNP-associated disease.

[0095] In certain embodiments, the PRNP-associated disease is a prion disease. In certain embodiments, the prion disease is a genetic prion diseass selected from the group consisting of familial Creutzfeldt-Jakob disease (CJD), Gerstmann-Straussler-Scheinker syndrome (GSS), and fatal familial insomnia (FFI). In some embodiments, the prion disease is a sporadic prion disease selected from the group consisting of sporadic Creutzfeldt-Jakob disease, Sporadic Fatal Insomnia (sFI), and Variably Proteinase-Sensitive Prionopathy (VPSPr). In another embodiment, the prion disease is an acquired prion disease selected from the group consisting of Iatrogenic CJD (iCJD), Kuru, and Variant CJD (vCJD).

[0096] In some embodiments, contacting the cell with the dsRNA agent inhibits the expression of PRNP by at least 50%, 60%, 70%, 80%, 90%, or 95%. In some embodiments, inhibiting expression of PRNP decreases PRNP protein levels in serum of the subject by at least 50%, 60%, 70%, 80%, 90%, or 95%.

[0097] In one aspect, the present invention provide a method of treating a subject having a disorder that would benefit from reduction in PRNP expression, the method comprising administering to the subject a therapeutically effective amount of any one of the dsRNA agents of the invention, or any one of the pharmaceutical compositions of the invention, thereby treating the subject having the disorder that would benefit from reduction in PRNP expression.

[0098] In another aspect, the present invention provides a method of preventing at least one symptom in a subject having a disorder that would benefit from reduction in PRNP expression, the method comprising administering to the subject a prophylactically effective amount of any one of the dsRNA agents of the invention, or any one of the pharmaceutical compositions of the invention, thereby preventing at least one symptom in the subject having the disorder that would benefit from reduction in PRNP expression.

[0099] In some embodiments, the disorder is a PRNP-associated disease. In some embodiments, the PRNP-associated disease is a prion disease. In some embodiments, the prion disease is a genetic prion disease selected from the group consisting of familial Creutzfeldt-Jakob disease (CJD), Gerstmann-Straussler-Scheinker syndrome (GSS), and fatal familial insomnia (FFI). In some embodiments, the prion disease is a sporadic prion disease selected from the group consisting of sporadic Creutzfeldt-Jakob disease, Sporadic Fatal Insomnia (sFI), and Variably Proteinase-Sensitive Prionopathy (VPSPr). In another embodiment, the prion disease is an acquired prion disease selected from the group consisting of Iatrogenic CJD (iCJD), Kuru, and Variant CJD (vCJD).

[0100] Another aspect of the instant disclosure provides a method of inhibiting the expression of PRNP in a subject, the method comprising administering to the subject a therapeutically effective amount of any one of the dsRNA agents of the invention, or any one of the pharmaceutical compositions of the invention, thereby inhibiting the expression of PRNP in the subject.

[0101] An additional aspect of the disclosure provides a method for treating or preventing a PRNP-associated disorder in a subject, the method comprising administering to the subject a therapeutically effective amount of any one of the dsRNA agents of the invention, or any one of the pharmaceutical compositions of the invention, thereby treating or preventing a PRNP-associated disorder in the subject.

[0102] In certain embodiments, the PRNP-associated disorder is selected from the group consisting of a prion disease, such as a genetic prion disease, e.g., familial Creutzfeldt-Jakob disease (CJD), Gerstmann-Sträussler-Scheinker syndrome (GSS), and fatal familial insomnia (FFI). In some embodiments, the prion disease is a sporadic prion disease selected from the group consisting of sporadic Creutzfeldt-Jakob disease, Sporadic Fatal Insomnia (sFI), and Variably Proteinase-Sensitive Prionopathy (VPSPr). In another embodiment, the prion disease is an acquired prion disease selected from the group consisting of Iatrogenic CJD (iCJD), Kuru, and Variant CJD (vCJD).

[0103] In some embodiments, the subject is human.

[0104] In some embodiments, the dsRNA agent is administered to the subject at a dose of about 0.01 mg/kg to 50 mg/kg or at a dose of about 5 mg to 1000 mg.

[0105] In some embodiments, the dsRNA agent is administered to the subject intrathecally.

[0106] In some embodiments, the dsRNA agent is administered to the subject subcutaneously.

[0107] In one embodiment, the method reduces the expression of a PRNP gene in a brain or spine tissue, e.g., striatum, cortex, cerebellum, cervical spine, lumbar spine, or thoracic spine.

[0108] In one embodiment, the method reduces the expression of a PRNP gene in the brain.

[0109] In some embodiments, the methods of the invention further comprise administering to the subject an additional agent for treatment or prevention of a PRNP-associated disorder. Exemplary additional therapeutics and treatments include, for example, sedatives, antidepressants, clonazepam, sodium valproate, opiates, antiepileptic drugs, cholinesterase inhibitors, memantine, benzodiazepines, levodopa, COMT inhibitors (e.g., tolcapone and entacapone), dopamine agonists (e.g., bromocriptine, pergolide, pramipexole, ropinirole, piribedil, cabergoline, apomorphine and lisuride), MAO-B inhibitors (e.g., safinamide, selegiline and rasagiline), amantadine, an anticholinergic, modafinil, pimavanserin, doxepin, rasagline, an antipsychotic, an atypical antipsychotic (e.g., amisulpride, olanzapine, risperidone, and clozapine), riluzole, edaravone, deep brain stimulation, non-invasive ventilation (NIV), invasive ventilation physical therapy, occupational therapy, speech therapy, dietary changes and swallowing technique a feeding tube, a PEG tube, probiotics, and psychological therapy.

[0110] The present invention also provides kits comprising any of the dsRNAs of the invention or any of the pharmaceutical compositions of the invention, and optionally, instructions for use.

[0111] In another embodiment, the RNAi agent is a pharmaceutically acceptable salt thereof. “Pharmaceutically acceptable salts” of each of RNAi agents herein include, but are not limited to, a sodium salt, a calcium salt, a lithium salt, a potassium salt, an ammonium salt, a magnesium salt, an mixtures thereof. One skilled in the art will appreciate that the RNAi agent, when provided as a polycationic salt having one cation per free acid group of the optionally modified phosophodiester backbone and/or any other acidic modifications (e.g., 5′-terminal phosphonate groups). For example, an oligonucleotide of “n” nucleotides in length contains n−1 optionally modified phosophodiesters, so that an oligonucleotide of 21 nt in length may be provided as a salt having up to 20 cations (e.g., 20 sodium cations). Similarly, an RNAi agentshaving a sense strand of 21 nt in length and an antisense strand of 23 nt in length may be provided as a salt having up to 42 cations (e.g., 42 sodium cations). In the preceding example, where the RNAi agent also includes a 5′-terminal phosphate or a 5′-terminal vinylphosphonate group, the RNAi agent may be provided as a salt having up to 44 cations (e.g., 44 sodium cations).

[0112] The present invention is further illustrated by the following detailed description.

### BRIEF DESCRIPTION OF THE DRAWINGS

[0113] FIG. 1 is a graph depicting the level of PRNP mRNA in the right-hemipsheres of wild-type mice at Day 28 following a single intracerebroventricular (ICV) injection of 50 μg, 150 μg, or 300 g dose of an exemplary dsRNA agent targeting PRNP, AD-1070516, or control, artificial CSF (aCSF) on Day 0.

### DETAILED DESCRIPTION OF THE INVENTION

[0114] The present disclosure provides RNAi compositions, which effect the RNA-induced silencing complex (RISC)-mediated cleavage of RNA transcripts of a PRNP gene. The PRNP gene may be within a cell, e.g., a cell within a subject, such as a human. The use of these iRNAs enables the targeted degradation of mRNAs of the corresponding gene (PRNP gene) in mammals.

[0115] The iRNAs of the invention have been designed to target a PRNP gene, including portions of the gene that are conserved in the PRNP orthologs of other mammalian species. Without intending to be limited by theory, it is believed that a combination or sub-combination of the foregoing properties and the specific target sites, or the specific modifications in these iRNAs confer to the iRNAs of the invention improved efficacy, stability, potency, durability, and safety.

[0116] Accordingly, the present disclosure also provides methods of using the RNAi compositions of the disclosure for inhibiting the expression of a PRNP gene or for treating a subject having a disorder that would benefit from inhibiting or reducing the expression of a PRNP gene, e.g., a PRNP-associated disesase, e.g., a prion disease, such as a genetic prion disease, such as, Creutzfeldt-Jakob Disease (CJD), Gerstmann-Straussler-Scheinker Disease (GSS), and Fatal Familial Insomnia (FFI), an acquired prion disease, such as Mad Cow Disease, Iatrogenic CJD (iCJD), Kuru, and Variant CJD (vCJD), or a sporadic prion diseasesuch as sporadic Creutzfeldt-Jakob disease, Sporadic Fatal Insomnia (sFI), and Variably Proteinase-Sensitive Prionopathy (VPSPr).

[0117] The RNAi agents of the disclosure include an RNA strand (the antisense strand) having a region which is about 30 nucleotides or less in length, e.g., 15-30, 15-29, 15-28, 15-27, 15-26, 15-25, 15-24, 15-23, 15-22, 15-21, 15-20, 15-19, 15-18, 15-17, 18-30, 18-29, 18-28, 18-27, 18-26, 18-25, 18-24, 18-23, 18-22, 18-21, 18-20, 19-30, 19-29, 19-28, 19-27, 19-26, 19-25, 19-24, 19-23, 19-22, 19-21, 19-20, 20-30, 20-29, 20-28, 20-27, 20-26, 20-25, 20-24,20-23, 20-22, 20-21, 21-30, 21-29, 21-28, 21-27, 21-26, 21-25, 21-24, 21-23, or 21-22 nucleotides in length, which region is substantially complementary to at least part of an mRNA transcript of a PRNP gene. In certain embodiments, the RNAi agents of the disclosure include an RNA strand (the antisense strand) having a region which is about 21-23 nucleotides in length, which region is substantially complementary to at least part of an mRNA transcript of a PRNP gene.

[0118] In certain embodiments, the RNAi agents of the disclosure include an RNA strand (the antisense strand) which can include longer lengths, for example up to 66 nucleotides, e.g., 36-66, 26-36, 25-36, 31-60, 22-43, 27-53 nucleotides in length with a region of at least 19 contiguous nucleotides that is substantially complementary to at least a part of an mRNA transcript of a PRNP gene. These RNAi agents with the longer length antisense strands can, for example, include a second RNA strand (the sense strand) of 20-60 nucleotides in length wherein the sense and antisense strands form a duplex of 18-30 contiguous nucleotides.

[0119] The use of these RNAi agents enables the targeted degradation of mRNAs of a PRNP gene in mammals. Thus, methods and compositions including these RNAi agents are useful for treating a subject who would benefit by a reduction in the levels or activity of a PRNP protein, such as a subject having a PRNP-associated disease, e.g., a prion disease.

[0120] The following detailed description discloses how to make and use compositions containing RNAi agents to inhibit the expression of a PRNP gene, as well as compositions and methods for treating subjects having diseases and disorders that would benefit from inhibition or reduction of the expression of the PRNP gene.

### I. Definitions

[0121] In order that the present disclosure may be more readily understood, certain terms are first defined. In addition, it should be noted that whenever a value or range of values of a parameter are recited, it is intended that values and ranges intermediate to the recited values are also intended to be part of this disclosure.

[0122] The articles “a” and “an” are used herein to refer to one or to more than one (i.e., to at least one) of the grammatical object of the article. By way of example, “an element” means one element or more than one element, e.g., a plurality of elements.

[0123] The term “including” is used herein to mean, and is used interchangeably with, the phrase “including but not limited to”.

[0124] The term “or” is used herein to mean, and is used interchangeably with, the term “and/or,” unless context clearly indicates otherwise.

[0125] The term “about” is used herein to mean within the typical ranges of tolerances in the art. For example, “about” can be understood as about 2 standard deviations from the mean. In certain embodiments, about means±10%. In certain embodiments, about means±5%. When about is present before a series of numbers or a range, it is understood that “about” can modify each of the numbers in the series or range.

[0126] The term “at least”, “no less than”, or “or more” prior to a number or series of numbers is understood to include the number adjacent to the term “at least”, and all subsequent numbers or integers that could logically be included, as clear from context. For example, the number of nucleotides in a nucleic acid molecule must be an integer. For example, “at least 18 nucleotides of a 21 nucleotide nucleic acid molecule” means that 18, 19, 20, or 21 nucleotides have the indicated property. When at least is present before a series of numbers or a range, it is understood that “at least” can modify each of the numbers in the series or range.

[0127] As used herein, “no more than” or “or less” is understood as the value adjacent to the phrase and logical lower values or intergers, as logical from context, to zero. For example, a duplex with an overhang of “no more than 2 nucleotides” has a 2, 1, or 0 nucleotide overhang. When “no more than” is present before a series of numbers or a range, it is understood that “no more than” can modify each of the numbers in the series or range. As used herein, ranges include both the upper and lower limit.

[0128] As used herein, methods of detection can include determination that the amount of analyte present is below the level of detection of the method.

[0129] In the event of a conflict between an indicated target site and the nucleotide sequence for a sense or antisense strand, the indicated sequence takes precedence.

[0130] In the event of a conflict between a chemical structure and a chemical name, the chemical structure takes precedence.

[0131] As used herein, the term “prion protein,” used interchangeably with the term “PRNP,” refers to the well-known gene and polypeptide, also known in the art as AltPrP, ASCR, CD230 antigen, CJD, GSS, Kuru, prion protein (p27-30), PRIP, PrP, PrP27-30, PrP33-35C and PrPc.

[0132] Prion protein genes are highly conserved in mammals, and have been implicated in neurogenesis and differentiation of neural stem cells, neuritogenesis, involvement and interaction with signal transduction pathways, synaptogenesis, neuronal survival via anti- or pro-apoptotic functions, copper binding, redox homeostasis, long-term renewal of hemopoietic stem cells, activation and development of T cells, differentiation and modulation of phagocytosis of leukocytes, and altering leukocyte recruitment to sites of inflammation (Caughey B, Baron GS. Nature. 2006; 443:803-810).

[0133] Multiple isoforms of the prion protein exist, two of which are most relevant to prion disease, cellular prion protein (PrP^{C}) and scrapie prion protein (PrP^{Sc}). Both PrP^{C} and PrP^{Sc} isoforms have the same amino acid sequence, however, PrP^{C} consists mainly of α-helices while PrP^{Sc} has undergone a three-dimentsonal structure change to have an increased R-sheet structure. This conformational difference makes PrP^{Sc} insoluble in detergents and relatively resistant to degradation by proteases. PrP^{Sc} has been shown to be infectious and to self-propagate by acting as a template that induces the conversion of PrP^{C} to PrP^{Sc}. PrP^{Sc} propagates as oligomers, which polymerize to form amyloid fibrils. The abnormal PrP^{Sc} protein builds up in the brain, forming clumps that damage or destroy neurons. The loss of these cells creates microscopic sponge-like holes (vacuoles) in the brain, which leads to the signs and symptoms of prion disease.

[0134] The term “PRNP” includes human PRNP, the amino acid and nucleotide sequence of which may be found in, for example, GenBank Accession No. NM_000311.5 (GI: 1653962152; SEQ ID NO:1); mouse PRNP, the amino acid and nucleotide sequence of which may be found in, for example, GenBank Accession No. NM_001278256.1 (GI: 506326230; SEQ ID NO:2); and rat PRNP, the amino acid and nucleotide sequence of which may be found in, for example, GenBank Accession No. XM_006235062.3 (GI:1046878307; SEQ ID NO:3). The term “PRNP” also includes Macaca fascicularis PRNP, the amino acid and nucleotide sequence of which may be found in, for example, GenBank Accession No. XM_005568413.2 (GI:982273619; SEQ ID NO:4).

[0135] Additional examples of PRNP mRNA sequences are readily available using, e.g., GenBank, UniProt, OMIM, and the Macaca genome project web site.

[0136] Exemplary PRNP nucleotide sequences may also be found in SEQ ID NOs:1-4. SEQ ID NOs:5-8 are the reverse complement sequences of SEQ ID NOs:1-4, respectively.

[0137] Further information on PRNP is provided, for example in the NCBI Gene database at www.ncbi.nlm.nih.gov/gene/5621.

[0138] The entire contents of each of the foregoing GenBank Accession numbers and the Gene database numbers are incorporated herein by reference as of the date of filing this application.

[0139] The terms “prion protein” and “PRNP,” as used herein, also refers to naturally occurring DNA sequence variations of the PRNP gene. Numerous sequence variations within the PRNP gene have been identified and may be found at, for example, NCBI dbSNP and UniProt (see, e.g., www.ncbi.nlm.nih.gov/snp?LinkName=gene_snp&from_uid=5621, the entire contents of which is incorporated herein by reference as of the date of filing this application.

[0140] As used herein, “target sequence” refers to a contiguous portion of the nucleotide sequence of an mRNA molecule formed during the transcription of a PRNP gene, including mRNA that is a product of RNA processing of a primary transcription product. In one embodment, the target portion of the sequence will be at least long enough to serve as a substrate for RNAi-directed cleavage at or near that portion of the nucleotide sequence of an mRNA molecule formed during the transcription of a PRNP gene. In one embodiment, the target sequence is within the protein coding region of the PRNP gene. In another embodiment, the target sequence is within the 3′ UTR of the PRNP gene.

[0141] The target sequence may be from about 9-36 nucleotides in length, e.g., about 15-30 nucleotides in length. For example, the target sequence can be from about 15-30 nucleotides, 15-29, 15-28, 15-27, 15-26, 15-25, 15-24, 15-23, 15-22, 15-21, 15-20, 15-19, 15-18, 15-17, 18-30, 18-29, 18-28, 18-27, 18-26, 18-25, 18-24, 18-23, 18-22, 18-21, 18-20, 19-30, 19-29, 19-28, 19-27, 19-26, 19-25, 19-24, 19-23, 19-22, 19-21, 19-20, 20-30, 20-29, 20-28, 20-27, 20-26, 20-25, 20-24,20-23, 20-22, 20-21, 21-30, 21-29, 21-28, 21-27, 21-26, 21-25, 21-24, 21-23, or 21-22 nucleotides in length. In some embodiments, the target sequence is about 19 to about 30 nucleotides in length. In other embodiments, the target sequence is about 19 to about 25 nucleotides in length. In still other embodiments, the target sequence is about 19 to about 23 nucleotides in length. In some embodiments, the target sequence is about 21 to about 23 nucleotides in length. Ranges and lengths intermediate to the above recited ranges and lengths are also contemplated to be part of the invention.

[0142] As used herein, the term “strand comprising a sequence” refers to an oligonucleotide comprising a chain of nucleotides that is described by the sequence referred to using the standard nucleotide nomenclature.

[0143] “G,” “C,” “A,” “T”, and “U” each generally stand for a nucleotide that contains guanine, cytosine, adenine, thymidine, and uracil as a base, respectively in the context of a modified or unmodified nucleotide. However, it will be understood that the term “ribonucleotide” or “nucleotide” can also refer to a modified nucleotide, as further detailed below, or a surrogate replacement moiety (see, e.g., Table 1). The skilled person is well aware that guanine, cytosine, adenine, thymidine, and uracil can be replaced by other moieties without substantially altering the base pairing properties of an oligonucleotide comprising a nucleotide bearing such replacement moiety. For example, without limitation, a nucleotide comprising inosine as its base can base pair with nucleotides containing adenine, cytosine, or uracil. Hence, nucleotides containing uracil, guanine, or adenine can be replaced in the nucleotide sequences of dsRNA featured in the disclosure by a nucleotide containing, for example, inosine. In another example, adenine and cytosine anywhere in the oligonucleotide can be replaced with guanine and uracil, respectively to form G-U Wobble base pairing with the target mRNA. Sequences containing such replacement moieties are suitable for the compositions and methods featured in the disclosure.

[0144] The terms “iRNA”, “RNAi agent,” “iRNA agent,” “RNA interference agent” as used interchangeably herein, refer to an agent that contains RNA as that term is defined herein, and which mediates the targeted cleavage of an RNA transcript via an RNA-induced silencing complex (RISC) pathway. RNA interference (RNAi) is a process that directs the sequence-specific degradation of mRNA. RNAi modulates, e.g., inhibits, the expression of PRNP in a cell, e.g., a cell within a subject, such as a mammalian subject.

[0145] In one embodiment, an RNAi agent of the disclosure includes a single stranded RNAi that interacts with a target RNA sequence, e.g., a PRNP target mRNA sequence, to direct the cleavage of the target RNA. Without wishing to be bound by theory it is believed that long double stranded RNA introduced into cells is broken down into double-stranded short interfering RNAs (siRNAs) comprising a sense strand and an antisense strand by a Type III endonuclease known as Dicer (Sharp et al. (2001) Genes Dev. 15:485). Dicer, a ribonuclease-III-like enzyme, processes these dsRNA into 19-23 base pair short interfering RNAs with characteristic two base 3′ overhangs (Bernstein, et al., (2001) Nature 409:363). These siRNAs are then incorporated into an RNA-induced silencing complex (RISC) where one or more helicases unwind the siRNA duplex, enabling the complementary antisense strand to guide target recognition (Nykanen, et al., (2001) Cell 107:309). Upon binding to the appropriate target mRNA, one or more endonucleases within the RISC cleave the target to induce silencing (Elbashir, et al., (2001) Genes Dev. 15:188). Thus, in one aspect the disclosure relates to a single stranded RNA (ssRNA) (the antisense strand of a siRNA duplex) generated within a cell and which promotes the formation of a RISC complex to effect silencing of the target gene, i.e., a PRNP gene. Accordingly, the term “siRNA” is also used herein to refer to an RNAi as described above.

[0146] In another embodiment, the RNAi agent may be a single-stranded RNA that is introduced into a cell or organism to inhibit a target mRNA. Single-stranded RNAi agents bind to the RISC endonuclease, Argonaute 2, which then cleaves the target mRNA. The single-stranded siRNAs are generally 15-30 nucleotides and are chemically modified. The design and testing of single-stranded RNAs are described in U.S. Pat. No. 8,101,348 and in Lima et al., (2012) Cell 150:883-894, the entire contents of each of which are hereby incorporated herein by reference. Any of the antisense nucleotide sequences described herein may be used as a single-stranded siRNA as described herein or as chemically modified by the methods described in Lima et al., (2012) Cell 150:883-894.

[0147] In another embodiment, a “RNAi agent” for use in the compositions and methods of the disclosure is a double stranded RNA and is referred to herein as a “double stranded RNAi agent,” “double stranded RNA (dsRNA) molecule,” “dsRNA agent,” or “dsRNA”. The term “dsRNA” refers to a complex of ribonucleic acid molecules, having a duplex structure comprising two anti-parallel and substantially complementary nucleic acid strands, referred to as having “sense” and “antisense” orientations with respect to a target RNA, i.e., a PRNP gene. In some embodiments of the disclosure, a double stranded RNA (dsRNA) triggers the degradation of a target RNA, e.g., an mRNA, through a post-transcriptional gene-silencing mechanism referred to herein as RNA interference or RNAi.

[0148] In general, a dsRNA molecule can include ribonucleotides, but as described in detail herein, each or both strands can also include one or more non-ribonucleotides, e.g., a deoxyribonucleotide, a modified nucleotide. In addition, as used in this specification, an “RNAi agent” may include ribonucleotides with chemical modifications; an RNAi agent may include substantial modifications at multiple nucleotides; an RNAi agent may include substantial modifications at multiple nucleotides.

[0149] As used herein, the term “modified nucleotide” refers to a nucleotide having, independently, a modified sugar moiety, a modified internucleotide linkage, or a modified nucleobase. Thus, the term modified nucleotide encompasses substitutions, additions or removal of, e.g., a functional group or atom, to internucleoside linkages, sugar moieties, or nucleobases. The modifications suitable for use in the agents of the disclosure include all types of modifications disclosed herein or known in the art. Any such modifications, as used in a siRNA type molecule, are encompassed by “RNAi agent” for the purposes of this specification and claims.

[0150] In certain embodiments of the instant disclosure, inclusion of a deoxy-nucleotide—which is acknowledged as a naturally occurring form of nucleotide—if present within a RNAi agent can be considered to constitute a modified nucleotide.

[0151] The duplex region may be of any length that permits specific degradation of a desired target RNA through a RISC pathway, and may range from about 9 to 36 base pairs in length, e.g., about 15-30 base pairs in length, for example, about 9, 10, 11, 12, 13, 14, 15, 16, 17, 18, 19, 20, 21, 22, 23, 24, 25, 26, 27, 28, 29, 30, 31, 32, 33, 34, 35, or 36 base pairs in length, such as about 15-30, 15-29, 15-28, 15-27, 15-26, 15-25, 15-24, 15-23, 15-22, 15-21, 15-20, 15-19, 15-18, 15-17, 18-30, 18-29, 18-28, 18-27, 18-26, 18-25, 18-24, 18-23, 18-22, 18-21, 18-20, 19-30, 19-29, 19-28, 19-27, 19-26, 19-25, 19-24, 19-23, 19-22, 19-21, 19-20, 20-30, 20-29, 20-28, 20-27, 20-26, 20-25, 20-24,20-23, 20-22, 20-21, 21-30, 21-29, 21-28, 21-27, 21-26, 21-25, 21-24, 21-23, or 21-22 base pairs in length. Ranges and lengths intermediate to the above recited ranges and lengths are also contemplated to be part of the invention.

[0152] The two strands forming the duplex structure may be different portions of one larger RNA molecule, or they may be separate RNA molecules. Where the two strands are part of one larger molecule, and therefore are connected by an uninterrupted chain of nucleotides between the 3′-end of one strand and the 5′-end of the respective other strand forming the duplex structure, the connecting RNA chain is referred to as a “hairpin loop.” A hairpin loop can comprise at least one unpaired nucleotide. In some embodiments, the hairpin loop can comprise at at least 4, at least 5, at least 6, at least 7, at least 8, at least 9, at least 10, at least 20, at least 23 or more unpaired nucleotides or nucleotides not directed to the target site of the dsRNA. In some embodiments, the hairpin loop can be 10 or fewer nucleotides. In some embodiments, the hairpin loop can be 8 or fewer unpaired nucleotides. In some embodiments, the hairpin loop can be 4-10 unpaired nucleotides. In some embodiments, the hairpin loop can be 4-8 nucleotides.

[0153] In certain embodiments, the two strands of double-stranded oligomeric compound can be linked together. The two strands can be linked to each other at both ends, or at one end only. By linking at one end is meant that 5′-end of first strand is linked to the 3′-end of the second strand or 3′-end of first strand is linked to 5′-end of the second strand. When the two strands are linked to each other at both ends, 5′-end of first strand is linked to 3′-end of second strand and 3′-end of first strand is linked to 5′-end of second strand. The two strands can be linked together by an oligonucleotide linker including, but not limited to, (N)n; wherein N is independently a modified or unmodified nucleotide and n is 3-23. In some embodiments, n is 3-10, e.g., 3, 4, 5, 6, 7, 8, 9, or 10. In some embodiments, the oligonucleotide linker is selected from the group consisting of GNRA, (G)4, (U)4, and (dT)4, wherein N is a modified or unmodified nucleotide and R is a modified or unmodified purine nucleotide. Some of the nucleotides in the linker can be involved in base-pair interactions with other nucleotides in the linker. The two strands can also be linked together by a non-nucleosidic linker, e.g. a linker described herein. It will be appreciated by one of skill in the art that any oligonucleotide chemical modifications or variations describe herein can be used in the oligonucleotide linker.

[0154] Hairpin and dumbbell type oligomeric compounds will have a duplex region equal to or at least 14, 15, 15, 16, 17, 18, 19, 29, 21, 22, 23, 24, or 25 nucleotide pairs. The duplex region can be equal to or less than 200, 100, or 50, in length. In some embodiments, ranges for the duplex region are 15-30, 17 to 23, 19 to 23, and 19 to 21 nucleotides pairs in length.

[0155] The hairpin oligomeric compounds can have a single strand overhang or terminal unpaired region, in some embodiments at the 3′, and in some embodiments on the antisense side of the hairpin. In some embodiments, the overhangs are 1-4, more generally 2-3 nucleotides in length. The hairpin oligomeric compounds that can induce RNA interference are also referred to as “shRNA” herein.

[0156] Where the two substantially complementary strands of a dsRNA are comprised by separate RNA molecules, those molecules need not, but can be covalently connected. Where the two strands are connected covalently by means other than an uninterrupted chain of nucleotides between the 3′-end of one strand and the 5′-end of the respective other strand forming the duplex structure, the connecting structure is referred to as a “linker.” The RNA strands may have the same or a different number of nucleotides. The maximum number of base pairs is the number of nucleotides in the shortest strand of the dsRNA minus any overhangs that are present in the duplex. In addition to the duplex structure, an RNAi may comprise one or more nucleotide overhangs.

[0157] In one embodiment, an RNAi agent of the invention is a dsRNA, each strand of which is 24-30 nucleotides in length, that interacts with a target RNA sequence, e.g., a PRNP target mRNA sequence, to direct the cleavage of the target RNA. Without wishing to be bound by theory, long double stranded RNA introduced into cells is broken down into siRNA by a Type III endonuclease known as Dicer (Sharp et al. (2001) Genes Dev. 15:485). Dicer, a ribonuclease-III-like enzyme, processes the dsRNA into 19-23 base pair short interfering RNAs with characteristic two base 3′ overhangs (Bernstein, et al., (2001) Nature 409:363). The siRNAs are then incorporated into an RNA-induced silencing complex (RISC) where one or more helicases unwind the siRNA duplex, enabling the complementary antisense strand to guide target recognition (Nykanen, et al., (2001) Cell 107:309). Upon binding to the appropriate target mRNA, one or more endonucleases within the RISC cleave the target to induce silencing (Elbashir, et al., (2001) Genes Dev. 15:188).

[0158] In one embodiment, an RNAi agent of the invention is a dsRNA agent, each strand of which comprises 19-23 nucleotides that interacts with a PRNP RNA sequence to direct the cleavage of the target RNA. Without wishing to be bound by theory, long double stranded RNA introduced into cells is broken down into siRNA by a Type III endonuclease known as Dicer (Sharp et al. (2001) Genes Dev. 15:485). Dicer, a ribonuclease-III-like enzyme, processes the dsRNA into 19-23 base pair short interfering RNAs with characteristic two base 3′ overhangs (Bernstein, et al., (2001) Nature 409:363). The siRNAs are then incorporated into an RNA-induced silencing complex (RISC) where one or more helicases unwind the siRNA duplex, enabling the complementary antisense strand to guide target recognition (Nykanen, et al., (2001) Cell 107:309). Upon binding to the appropriate target mRNA, one or more endonucleases within the RISC cleave the target to induce silencing (Elbashir, et al., (2001) Genes Dev. 15:188). In one embodiment, an RNAi agent of the invention is a dsRNA of 24-30 nucleotides that interacts with a PRNP RNA sequence to direct the cleavage of the target RNA.

[0159] As used herein, the term “nucleotide overhang” refers to at least one unpaired nucleotide that protrudes from the duplex structure of a RNAi agent, e.g., a dsRNA. For example, when a 3′-end of one strand of a dsRNA extends beyond the 5′-end of the other strand, or vice versa, there is a nucleotide overhang. A dsRNA can comprise an overhang of at least one nucleotide; alternatively, the overhang can comprise at least two nucleotides, at least three nucleotides, at least four nucleotides, at least five nucleotides or more. A nucleotide overhang can comprise or consist of a nucleotide/nucleoside analog, including a deoxynucleotide/nucleoside. The overhang(s) can be on the sense strand, the antisense strand or any combination thereof. Furthermore, the nucleotide(s) of an overhang can be present on the 5′-end, 3′-end or both ends of either an antisense or sense strand of a dsRNA.

[0160] In one embodiment, the antisense strand of a dsRNA has a 1-10 nucleotide, e.g., a 1, 2, 3, 4, 5, 6, 7, 8, 9, or 10 nucleotide, overhang at the 3′-end or the 5′-end. In one embodiment, the sense strand of a dsRNA has a 1-10 nucleotide, e.g., a 1, 2, 3, 4, 5, 6, 7, 8, 9, or 10 nucleotide, overhang at the 3′-end or the 5′-end. In another embodiment, one or more of the nucleotides in the overhang is replaced with a nucleoside thiophosphate.

[0161] In certain embodiments, the antisense strand of a dsRNA has a 1-10 nucleotide, e.g., 0-3, 1-3, 2-4, 2-5, 4-10, 5-10, e.g., a 1, 2, 3, 4, 5, 6, 7, 8, 9, or 10 nucleotide, overhang at the 3′-end or the 5′-end. In one embodiment, the sense strand of a dsRNA has a 1-10 nucleotide, e.g., a 1, 2, 3, 4, 5, 6, 7, 8, 9, or 10 nucleotide, overhang at the 3′-end or the 5′-end. In another embodiment, one or more of the nucleotides in the overhang is replaced with a nucleoside thiophosphate.

[0162] In certain embodiments, the overhang on the sense strand or the antisense strand, can include extended lengths longer than 10 nucleotides, e.g., 1-30 nucleotides, 2-30 nucleotides, 10-30 nucleotides, or 10-15 nucleotides in length. In certain embodiments, an extended overhang is on the sense strand of the duplex. In certain embodiments, an extended overhang is present on the 3′end of the sense strand of the duplex. In certain embodiments, an extended overhang is present on the 5′end of the sense strand of the duplex. In certain embodiments, an extended overhang is on the antisense strand of the duplex. In certain embodiments, an extended overhang is present on the 3′end of the antisense strand of the duplex. In certain embodiments, an extended overhang is present on the 5′end of the antisense strand of the duplex. In certain embodiments, one or more of the nucleotides in the overhang is replaced with a nucleoside thiophosphate. In certain embodiments, the overhang includes a self-complementary portion such that the overhang is capable of forming a hairpin structure that is stable under physiological conditions.

[0163] In certain embodiments, at least one end of at least one strand is extended beyond a duplex targeting region, including structures where one of the strands includes a thermodynamically-stabilizing tetraloop structure (see, e.g., U.S. Pat. Nos. 8,513,207 and 8,927,705, as well as WO2010033225, the entire contents of each of which are incorporated by reference herein). Such structures may include single-stranded extensions (on one or both sides of the molecule) as well as double-stranded extensions.

[0164] In certain embodiments, the 3′ end of the sense strand and the 5′ end of the antisense strand are joined by a polynucleotide sequence comprising ribonucleotides, deoxyribonucleotides or both, optionally wherein the polynucleotide sequence comprises a tetraloop sequence. In certain embodiments, the sense strand is 25-35 nucleotides in length.

[0165] A tetraloop may contain ribonucleotides, deoxyribonucleotides, modified nucleotides, and combinations thereof. Typically, a tetraloop has 4 to 5 nucleotides. In some embodiments, the loop comprises a sequence set forth as GAAA. In some embodiments, at least one of the nucleotide of the loop (GAAA) comprises a nucleotide modification. In some embodiments, the modified nucleotide comprises a 2′-modification. In some embodiments, the 2′-modification is a modification selected from the group consisting of 2′-aminoethyl, 2′-fluoro, 2′-O-methyl, 2′-O-methoxyethyl, 2′-aminodiethoxymethanol, 2′-adem, and 2′-deoxy-2′-fhioro--d-arabinonucleic acid. In some embodiments, all of the nucleotides of the loop are modified. In some embodiments, the G in the GAAA sequence comprises a 2′-OH. In some embodiments, each of the nucleotides in the GAAA sequence comprises a 2′-O-methyl modification. In some embodiments, each of the A in the GAAA sequence comprises a 2′-OH and the G in the GAAA sequence comprises a 2′-O-methyl modification. In some embodiments, each of the A in the GAAA sequence comprises a 2′-O-methoxyethyl (MOE) modification and the G in the GAAA sequence comprises a 2′-O-methyl modification; or each of the A in the GAAA sequence comprises a 2′-adem modification and the G in the GAAA sequence comprises a 2′-O-methyl modification. See, e.g., PCT Publication No. WO 2020/206350, the entire contents of which are incorporated herein by reference.

[0166] An exemplary 2′adem modified nucleotide is shown below:

[chemical structure]

[0167] In one embodiment of the dsRNA, at least one strand comprises a 3′ overhang of at least 1 nucleotide. In another embodiment, at least one strand comprises a 3′ overhang of at least 2 nucleotides, e.g., 2, 3, 4, 5, 6, 7, 9, 10, 11, 12, 13, 14, or 15 nucleotides. In other embodiments, at least one strand of the RNAi agent comprises a 5′ overhang of at least 1 nucleotide. In certain embodiments, at least one strand comprises a 5′ overhang of at least 2 nucleotides, e.g., 2, 3, 4, 5, 6, 7, 9, 10, 11, 12, 13, 14, or 15 nucleotides. In still other embodiments, both the 3′ and the 5′ end of one strand of the RNAi agent comprise an overhang of at least 1 nucleotide.

[0168] In one embodiment, the antisense strand of a dsRNA has a 1-10 nucleotide, e.g., 0-3, 1-3, 2-4, 2-5, 4-10, 5-10, e.g., a 1, 2, 3, 4, 5, 6, 7, 8, 9, or 10 nucleotide, overhang at the 3′-end or the 5′-end. In one embodiment, the sense strand of a dsRNA has a 1-10 nucleotide, e.g., a 1, 2, 3, 4, 5, 6, 7, 8, 9, or 10 nucleotide, overhang at the 3′-end or the 5′-end. In another embodiment, one or more of the nucleotides in the overhang is replaced with a nucleoside thiophosphate.

[0169] In certain embodiments, the overhang on the sense strand or the antisense strand, or both, can include extended lengths longer than 10 nucleotides, e.g., 1-30 nucleotides, 2-30 nucleotides, 10-30 nucleotides, or 10-15 nucleotides in length. In certain embodiments, an extended overhang is on the sense strand of the duplex. In certain embodiments, an extended overhang is present on the 3′end of the sense strand of the duplex. In certain embodiments, an extended overhang is present on the 5′end of the sense strand of the duplex. In certain embodiments, an extended overhang is on the antisense strand of the duplex. In certain embodiments, an extended overhang is present on the 3′end of the antisense strand of the duplex. In certain embodiments, an extended overhang is present on the 5′end of the antisense strand of the duplex. In certain embodiments, one or more of the nucleotides in the overhang is replaced with a nucleoside thiophosphate. In certain embodiments, the overhang includes a self-complementary portion such that the overhang is capable of forming a hairpin structure that is stable under physiological conditions.

[0170] The terms “blunt” or “blunt ended” as used herein in reference to a dsRNA mean that there are no unpaired nucleotides or nucleotide analogs at a given terminal end of a dsRNA, i.e., no nucleotide overhang. One or both ends of a dsRNA can be blunt. Where both ends of a dsRNA are blunt, the dsRNA is said to be blunt ended. To be clear, a “blunt ended” dsRNA is a dsRNA that is blunt at both ends, i.e., no nucleotide overhang at either end of the molecule. Most often such a molecule will be double stranded over its entire length.

[0171] The term “antisense strand” or “guide strand” refers to the strand of a RNAi agent, e.g., a dsRNA, which includes a region that is substantially complementary to a target sequence, e.g., a PRNP mRNA.

[0172] As used herein, the term “region of complementarity” refers to the region on the antisense strand that is substantially complementary to a sequence, for example a target sequence, e.g., a PRNP nucleotide sequence, as defined herein. Where the region of complementarity is not fully complementary to the target sequence, the mismatches can be in the internal or terminal regions of the molecule. Generally, the most tolerated mismatches are in the terminal regions, e.g., within 5, 4, 3, or 2 nucleotides of the 5′- or 3′-terminus of the RNAi agent.

[0173] In some embodiments, a double stranded RNA agent of the invention includes a nucleotide mismatch in the antisense strand. In some embodiments, the antisense strand of the double stranded RNA agent of the invention includes no more than 4 mismatches with the target mRNA, e.g., the antisense strand includes 4, 3, 2, 1, or 0 mismatches with the target mRNA. In some embodiments, the antisense strand double stranded RNA agent of the invention includes no more than 4 mismatches with the sense strand, e.g., the antisense strand includes 4, 3, 2, 1, or 0 mismatches with the sense strand. In some embodiments, a double stranded RNA agent of the invention includes a nucleotide mismatch in the sense strand. In some embodiments, the sense strand of the double stranded RNA agent of the invention includes no more than 4 mismatches with the antisense strand, e.g., the sense strand includes 4, 3, 2, 1, or 0 mismatches with the antisense strand. In some embodiments, the nucleotide mismatch is, for example, within 5, 4, 3 nucleotides from the 3′-end of the iRNA. In another embodiment, the nucleotide mismatch is, for example, in the 3′-terminal nucleotide of the iRNA agent. In some embodiments, the mismatch(s) is not in the seed region.

[0174] Thus, an RNAi agent as described herein can contain one or more mismatches to the target sequence. In one embodiment, a RNAi agent as described herein contains no more than 3 mismatches (i.e., 3, 2, 1, or 0 mismatches). In one embodiment, an RNAi agent as described herein contains no more than 2 mismatches. In one embodiment, an RNAi agent as described herein contains no more than 1 mismatch. In one embodiment, an RNAi agent as described herein contains 0 mismatches. In certain embodiments, if the antisense strand of the RNAi agent contains mismatches to the target sequence, the mismatch can optionally be restricted to be within the last 5 nucleotides from either the 5′- or 3′-end of the region of complementarity. For example, in such embodiments, for a 23 nucleotide RNAi agent, the strand which is complementary to a region of a PRNP gene, generally does not contain any mismatch within the central 13 nucleotides. The methods described herein or methods known in the art can be used to determine whether an RNAi agent containing a mismatch to a target sequence is effective in inhibiting the expression of a PRNP gene. Consideration of the efficacy of RNAi agents with mismatches in inhibiting expression of a PRNP gene is important, especially if the particular region of complementarity in a PRNP gene is known to have polymorphic sequence variation within the population.

[0175] The term “sense strand” or “passenger strand” as used herein, refers to the strand of a RNAi agent that includes a region that is substantially complementary to a region of the antisense strand as that term is defined herein.

[0176] As used herein, “substantially all of the nucleotides are modified” are largely but not wholly modified and can include not more than 5, 4, 3, 2, or 1 unmodified nucleotides.

[0177] As used herein, the term “cleavage region” refers to a region that is located immediately adjacent to the cleavage site. The cleavage site is the site on the target at which cleavage occurs. In some embodiments, the cleavage region comprises three bases on either end of, and immediately adjacent to, the cleavage site. In some embodiments, the cleavage region comprises two bases on either end of, and immediately adjacent to, the cleavage site. In some embodiments, the cleavage site specifically occurs at the site bound by nucleotides 10 and 11 of the antisense strand, and the cleavage region comprises nucleotides 11, 12 and 13.

[0178] As used herein, and unless otherwise indicated, the term “complementary,” when used to describe a first nucleotide sequence in relation to a second nucleotide sequence, refers to the ability of an oligonucleotide or polynucleotide comprising the first nucleotide sequence to hybridize and form a duplex structure under certain conditions with an oligonucleotide or polynucleotide comprising the second nucleotide sequence, as will be understood by the skilled person. Such conditions can be, for example, “stringent conditions”, where stringent conditions can include: 400 mM NaCl, 40 mM PIPES pH 6.4, 1 mM EDTA, 50° C. or 70° C. for 12-16 hours followed by washing (see, e.g., “Molecular Cloning: A Laboratory Manual, Sambrook, et al. (1989) Cold Spring Harbor Laboratory Press). Other conditions, such as physiologically relevant conditions as can be encountered inside an organism, can apply. The skilled person will be able to determine the set of conditions most appropriate for a test of complementarity of two sequences in accordance with the ultimate application of the hybridized nucleotides.

[0179] Complementary sequences within a RNAi agent, e.g., within a dsRNA as described herein, include base-pairing of the oligonucleotide or polynucleotide comprising a first nucleotide sequence to an oligonucleotide or polynucleotide comprising a second nucleotide sequence over the entire length of one or both nucleotide sequences. Such sequences can be referred to as “fully complementary” with respect to each other herein. However, where a first sequence is referred to as “substantially complementary” with respect to a second sequence herein, the two sequences can be fully complementary, or they can form one or more, but generally not more than 5, 4, 3, or 2 mismatched base pairs upon hybridization for a duplex up to 30 base pairs, while retaining the ability to hybridize under the conditions most relevant to their ultimate application, e.g., inhibition of gene expression, in vitro or in vivo. However, where two oligonucleotides are designed to form, upon hybridization, one or more single stranded overhangs, such overhangs shall not be regarded as mismatches with regard to the determination of complementarity. For example, a dsRNA comprising one oligonucleotide 21 nucleotides in length and another oligonucleotide 23 nucleotides in length, wherein the longer oligonucleotide comprises a sequence of 21 nucleotides that is fully complementary to the shorter oligonucleotide, can yet be referred to as “fully complementary” for the purposes described herein.

[0180] “Complementary” sequences, as used herein, can also include, or be formed entirely from, non-Watson-Crick base pairs or base pairs formed from non-natural and modified nucleotides, in so far as the above requirements with respect to their ability to hybridize are fulfilled. Such non-Watson-Crick base pairs include, but are not limited to, G:U Wobble or Hoogsteen base pairing.

[0181] The terms “complementary,” “fully complementary” and “substantially complementary” herein can be used with respect to the base matching between the sense strand and the antisense strand of a dsRNA, or between two oligonucleotides or polynucleotides, such as the antisense strand of a RNAi agent and a target sequence, as will be understood from the context of their use.

[0182] As used herein, a polynucleotide that is “substantially complementary to at least part of” a messenger RNA (mRNA) refers to a polynucleotide that is substantially complementary to a contiguous portion of the mRNA of interest (e.g., an mRNA encoding PRNP). For example, a polynucleotide is complementary to at least a part of a PRNP mRNA if the sequence is substantially complementary to a non-interrupted portion of an mRNA encoding PRNP.

[0183] Accordingly, in some embodiments, the antisense strand polynucleotides disclosed herein are fully complementary to the target PRNP sequence.

[0184] In other embodiments, the antisense strand polynucleotides disclosed herein are substantially complementary to the target PRNP sequence and comprise a contiguous nucleotide sequence which is at least about 80% complementary over its entire length to the equivalent region of the nucleotide sequence of SEQ ID NOs: 1-4 for PRNP, or a fragment of SEQ ID NOs: 1-4, such as about 85%, about 90%, about 91%, about 92%, about 93%, about 94%, about 95%, about 96%, about 97%, about 98%, or about 99% complementary

[0185] In other embodiments, the antisense polynucleotides disclosed herein are substantially complementary to the target PRNP sequence and comprise a contiguous nucleotide sequence which is at least about 80% complementary over its entire length to any one of the sense strand nucleotide sequences in any one of Tables 2-3, or a fragment of any one of the sense strand nucleotide sequences in any one of Tables 2-3, such as about 85%, about 90%, about 91%, about 92%, about 93%, about 94%, about 95%, about 96%, about 97%, about 98%, or about 99% complementary.

[0186] In one embodiment, an RNAi agent of the disclosure includes a sense strand that is substantially complementary to an antisense polynucleotide which, in turn, is the same as a target PRNP sequence, and wherein the sense strand polynucleotide comprises a contiguous nucleotide sequence which is at least about 80% complementary over its entire length to the equivalent region of the nucleotide sequence of SEQ ID NOs: 5-8, or a fragment of any one of SEQ ID NOs: 5-8, such as about 85%, about 90%, about 91%, about 92%, about 93%, about 94%, about 95%, about 96%, about 97%, about 98%, or about 99% complementary.

[0187] In some embodiments, the antisense polynucleotides disclosed herein are substantially complementary to a fragment of a target PRNP sequence and comprise a contiguous nucleotide sequence which is at least 80% complementary over its entire length to a fragment of SEQ ID NO: 1 selected from the group of nucleotides 502-524, 507-529, 502-529, 540-562, 566-588, 575-597, 576-598, 589-611, 575-611, 593-615, 594-616, 600-622, 593-622, 650-672, 858-880, 976-998, 1100-1122, 1126-1148, 1220-1242, 1221-1243, 1220-1243, 1304-1326, 1328-1350, 1410-1432, 1445-1467, 1481-1503, 1532-1554, 1610-1632, 1615-1637, 1617-1639, 1621-1643, 1610-1643, 1610-1639, 1688-1710, 1694-1714, 1830-1852, 1831-1853, 1854-1876, 1830-1853, 1872-1894, 1873-1895, 1938-1960, 2011-2033, 2015-2037, 2031-2053, 2034-2056, 2069-2091, 2076-2098, 2077-2099, 1872-1895, 2011-2037, 2069-2099, 2079-2101, 2031-2056, 2069-2098, 2138-2160, 2143-2165, 2158-2180, 2167-2189, 2168-2190, 2170-2192, 2174-2196, 2175-2197, 2177-2199, 2185-2207, 2189-2211, 2196-2218, 2200-2222, 2202-2224, 2221-2243, 2222-2244, 2223-2245, 2238-2260, 2241-2263, 2242-2264, 2138-2264, 2257-2358, 2174-2245, 2174-2224, 2138-2196, 2177-2224, 2223-2245, 2138-2189, 2177-2211, 2196-2224, 2257-2279, 2258-2280, 2335-2537, 2336-2358, 2257-2358, 2342-2364, 2397-2419, 2398-2420, 2399-2421, 2400-2422, 2401-2423, 2404-2426, 2397-2426, 2394-2423, 2397-2421, 2399-2426, and 2398-2421 of SEQ ID NO: 1, such as about 85%, about 90%, about 91%, about 92%, about 93%, about 94%, about 95%, about 96%, about 97%, about 98%, or about 99% complementary.

[0188] In some embodiments, the antisense polynucleotides disclosed herein are substantially complementary to a fragment of a target PRNP sequence and comprise a contiguous nucleotide sequence which is at least 80% complementary over its entire length to a fragment of SEQ ID NO: 1 selected from the group of nucleotides 530-570, 535-565, 539-561, 540-562, 555-605, 560-605, 560-600, 566-588, 567-589, 568-590, 569-591, 570-592, 575-597, 580-620-585-620, 589-611, 590-612, 591-613, 592-614, 593-615, 594-616, 600-650, 610-650, 613-635, 614-636, 615-637, 616-638, 617-639, 618-640, 640-680, 649-671, 650-672, 651-673, 670-700, 674-696, 675-697, 795-830, 804-826, 2325-2375, 2325-2370, 2330-2370, 2335-2357, 2336-2358, 2337-2359, 2338-2360, 2339-2361, or 2340-2362 of SEQ ID NO: 1, such as about 85%, about 90%, about 91%, about 92%, about 93%, about 94%, about 95%, about 96%, about 97%, about 98%, or about 99% complementary.

[0189] In other embodiments, the antisense polynucleotides disclosed herein are substantially complementary to a fragment of a target PRNP sequence and comprise a contiguous nucleotide sequence which is at least 80% complementary over its entire length to a fragment of SEQ ID NO: 1 selected from the group of nucleotides 502-524, 540-562, 589-611, 594-616, 650-672, 1445-1467, 1688-1710, 2011-2033, 2031-2053, 2185-2207, 2222-2244, 2336-2358, 2339-2361, 2399-2421 or 2258-2280 of SEQ ID NO: 1, such as about 85%, about 90%, about 91%, about 92%, about 93%, about 94%, about 95%, about 96%, about 97%, about 98%, or about 99% complementary.

[0190] In some embodiments, an iRNA of the invention includes a sense strand that is substantially complementary to an antisense polynucleotide which, in turn, is complementary to a target PRNP sequence, and wherein the sense strand polynucleotide comprises a contiguous nucleotide sequence which is at least about 80% complementary over its entire length to any one of the antisense strand nucleotide sequences in any one of any one of Tables 2-3, or a fragment of any one of the antisense strand nucleotide sequences in any one of Tables 2-3, such as about 85%, about 90%, about 91%, about 92%, about 93%, about 94%, about 95%, about 96%, about 97%, about 98%, or about 99% complementary.

[0191] In certain embodiments, the sense and antisense strands are selected from any one of duplexes AD-1070511, AD-1070462, AD-1070553, AD-1072048, AD-1070516 and AD-1072050, AD-1071769, AD-1071949, AD-1070444, AD-1071505, AD-1071912, AD-1071789, AD-1071265, AD-1072084, and AD-1071985.

[0192] In some embodiments, the double-stranded region of a double-stranded iRNA agent is equal to or at least, 10, 11, 12, 13, 14, 15, 16, 17, 18, 19, 20, 21, 22, 23, 23, 24, 25, 26, 27, 28, 29, 30 or more nucleotide pairs in length.

[0193] In some embodiments, the antisense strand of a double-stranded iRNA agent is equal to or at least 14, 15, 16, 17, 18, 19, 20, 21, 22, 23, 23, 24, 25, 26, 27, 28, 29, or 30 nucleotides in length.

[0194] In some embodiments, the sense strand of a double-stranded iRNA agent is equal to or at least 10, 11, 12, 13, 14, 15, 16, 17, 18, 19, 20, 21, 22, 23, 23, 24, 25, 26, 27, 28, 29, or 30 nucleotides in length.

[0195] In one embodiment, the sense and antisense strands of the double-stranded iRNA agent are each independently 15 to 30 nucleotides in length.

[0196] In one embodiment, the sense and antisense strands of the double-stranded iRNA agent are each independently 19 to 25 nucleotides in length.

[0197] In one embodiment, the sense and antisense strands of the double-stranded iRNA agent are each independently 21 to 23 nucleotides in length.

[0198] In one embodiment, the sense strand of the iRNA agent is 21-nucleotides in length, and the antisense strand is 23-nucleotides in length, wherein the strands form a double-stranded region of 21 consecutive base pairs having a 2-nucleotide long single stranded overhangs at the 3-end.

[0199] In one aspect of the invention, an agent for use in the methods and compositions of the invention is a single-stranded antisense nucleic acid molecule that inhibits a target mRNA via an antisense inhibition mechanism. The single-stranded antisense RNA molecule is complementary to a sequence within the target mRNA. The single-stranded antisense oligonucleotides can inhibit translation in a stoichiometric manner by base pairing to the mRNA and physically obstructing the translation machinery, see Dias, N. et al., (2002) Mol Cancer Ther 1:347-355. The single-stranded antisense RNA molecule may be about 15 to about 30 nucleotides in length and have a sequence that is complementary to a target sequence. For example, the single-stranded antisense RNA molecule may comprise a sequence that is at least about 15, 16, 17, 18, 19, 20, or more contiguous nucleotides from any one of the antisense sequences described herein.

[0200] In one embodiment, at least partial suppression of the expression of a PRNP gene, is assessed by a reduction of the amount of PRNP mRNA which can be isolated from or detected in a first cell or group of cells in which a PRNP gene is transcribed and which has or have been treated such that the expression of a PRNP gene is inhibited, as compared to a second cell or group of cells substantially identical to the first cell or group of cells but which has or have not been so treated (control cells). The degree of inhibition may be expressed in terms of:

$$\frac{( mRNA in control cells ) - ( mRNA in treated cells )}{( mRNA in control cells )} •100 \%$$

[0201] In one embodiment, inhibition of expression is determined by the dual luciferase method in Example 1 wherein the RNAi agent is present at 10 nM.

[0202] The phrase “contacting a cell with an RNAi agent,” such as a dsRNA, as used herein, includes contacting a cell by any possible means. Contacting a cell with an RNAi agent includes contacting a cell in vitro with the RNAi agent or contacting a cell in vivo with the RNAi agent. The contacting may be done directly or indirectly. Thus, for example, the RNAi agent may be put into physical contact with the cell by the individual performing the method, or alternatively, the RNAi agent may be put into a situation that will permit or cause it to subsequently come into contact with the cell.

[0203] Contacting a cell in vitro may be done, for example, by incubating the cell with the RNAi agent. Contacting a cell in vivo may be done, for example, by injecting the RNAi agent into or near the tissue where the cell is located, or by injecting the RNAi agent into another area, e.g., the central nervous system (CNS), optionally via intrathecal or other injection, or to the bloodstream or the subcutaneous space, such that the agent will subsequently reach the tissue where the cell to be contacted is located. For example, the RNAi agent may contain or be coupled to a ligand, e.g., a lipophilic moiety or moieties as described below and further detailed, e.g., in PCT Publication No. WO 2019/217459, which is incorporated herein by reference, that directs or otherwise stabilizes the RNAi agent at a site of interest, e.g., the CNS. In some embodiments, the RNAi agent may contain or be coupled to a ligand, e.g., one or more GalNAc derivatives as described below, that directs or otherwise stabilizes the RNAi agent at a site of interest, e.g., the liver. In other embodiments, the RNAi agent may contain or be coupled to a lipophilic moiety or moieties and one or more GalNAc derivatives. Combinations of in vitro and in vivo methods of contacting are also possible. For example, a cell may also be contacted in vitro with an RNAi agent and subsequently transplanted into a subject.

[0204] In one embodiment, contacting a cell with an RNAi agent includes “introducing” or “delivering the RNAi agent into the cell” by facilitating or effecting uptake or absorption into the cell. Absorption or uptake of a RNAi agent can occur through unaided diffusive or active cellular processes, or by auxiliary agents or devices. Introducing a RNAi agent into a cell may be in vitro or in vivo. For example, for in vivo introduction, a RNAi agent can be injected into a tissue site or administered systemically. In vitro introduction into a cell includes methods known in the art such as electroporation and lipofection. Further approaches are described herein below or are known in the art.

[0205] The term “lipophile” or “lipophilic moiety” broadly refers to any compound or chemical moiety having an affinity for lipids. One way to characterize the lipophilicity of the lipophilic moiety is by the octanol-water partition coefficient, log K_{ow}, where K_{ow} is the ratio of a chemical's concentration in the octanol-phase to its concentration in the aqueous phase of a two-phase system at equilibrium. The octanol-water partition coefficient is a laboratory-measured property of a substance. However, it may also be predicted by using coefficients attributed to the structural components of a chemical which are calculated using first-principle or empirical methods (see, for example, Tetko et al., J. Chem. Inf Comput. Sci. 41:1407-21 (2001), which is incorporated herein by reference in its entirety). It provides a thermodynamic measure of the tendency of the substance to prefer a non-aqueous or oily milieu rather than water (i.e. its hydrophilic/lipophilic balance). In principle, a chemical substance is lipophilic in character when its log K_{ow} exceeds 0. Typically, the lipophilic moiety possesses a log K_{ow} exceeding 1, exceeding 1.5, exceeding 2, exceeding 3, exceeding 4, exceeding 5, or exceeding 10. For instance, the log K_{ow} of 6-amino hexanol, for instance, is predicted to be approximately 0.7. Using the same method, the log K_{ow} of cholesteryl N-(hexan-6-ol) carbamate is predicted to be 10.7.

[0206] The lipophilicity of a molecule can change with respect to the functional group it carries. For instance, adding a hydroxyl group or amine group to the end of a lipophilic moiety can increase or decrease the partition coefficient (e.g., log K_{ow}) value of the lipophilic moiety.

[0207] Alternatively, the hydrophobicity of the double-stranded RNAi agent, conjugated to one or more lipophilic moieties, can be measured by its protein binding characteristics. For instance, in certain embodiments, the unbound fraction in the plasma protein binding assay of the double-stranded RNAi agent could be determined to positively correlate to the relative hydrophobicity of the double-stranded RNAi agent, which could then positively correlate to the silencing activity of the double-stranded RNAi agent.

[0208] In one embodiment, the plasma protein binding assay determined is an electrophoretic mobility shift assay (EMSA) using human serum albumin protein. An exemplary protocol of this binding assay is illustrated in detail in, e.g., PCT Publication No. WO 2019/217459. The hydrophobicity of the double-stranded RNAi agent, measured by fraction of unbound siRNA in the binding assay, exceeds 0.15, exceeds 0.2, exceeds 0.25, exceeds 0.3, exceeds 0.35, exceeds 0.4, exceeds 0.45, or exceeds 0.5 for an enhanced in vivo delivery of siRNA.

[0209] Accordingly, conjugating the lipophilic moieties to the internal position(s) of the double-stranded RNAi agent provides optimal hydrophobicity for the enhanced in vivo delivery of siRNA.

[0210] The term “lipid nanoparticle” or “LNP” is a vesicle comprising a lipid layer encapsulating a pharmaceutically active molecule, such as a nucleic acid molecule, e.g., a rNAi agent or a plasmid from which a RNAi agent is transcribed. LNPs are described in, for example, U.S. Pat. Nos. 6,858,225, 6,815,432, 8,158,601, and 8,058,069, the entire contents of which are hereby incorporated herein by reference.

[0211] As used herein, a “subject” is an animal, such as a mammal, including a primate (such as a human, a non-human primate, e.g., a monkey, and a chimpanzee), or a non-primate (such as a cow, sheep, rat, or a mouse). In one embodiment, the subject is a human, such as a human being treated or assessed for a disease, disorder, or condition that would benefit from reduction in PRNP expression; a human at risk for a disease, disorder, or condition that would benefit from reduction in PRNP expression; a human having a disease, disorder, or condition that would benefit from reduction in PRNP expression; or human being treated for a disease, disorder, or condition that would benefit from reduction in PRNP expression as described herein.

[0212] As used herein, the terms “treating” or “treatment” refer to a beneficial or desired result including, but not limited to, alleviation or amelioration of one or more signs or symptoms associated with PRNP gene expression or PRNP protein production, e.g., a PRNP-associated disease, e.g., a prion disease, such as a genetic prion disease, a sporadic prion disease, or an acquired prion disease, in subjects having such diseases. “Treatment” can also mean prolonging survival as compared to expected survival in the absence of treatment.

[0213] The term “lower” in the context of the level of PRNP in a subject or a disease marker or symptom refers to a statistically significant decrease in such level. The decrease can be, for example, at least 10%, 15%, 20%, 25%, 30%, %, 40%, 45%, 50%, 55%, 60%, 65%, 70%, 75%, 80%, 85%, 90%, 95%, or more. In certain embodiments, a decrease is at least 20%. In certain embodiments, the decrease is at least 50% in a disease marker, e.g., protein or gene expression level. “Lower” in the context of the level of PRNP in a subject is a decrease to a level accepted as within the range of normal for an individual without such disorder. In certain embodiments, “lower” is the decrease in the difference between the level of a marker or symptom for a subject suffering from a disease and a level accepted within the range of normal for an individual, e.g., the level of decrease in bodyweight between an obese individual and an individual having a weight accepted within the range of normal.

[0214] As used herein, “prevention” or “preventing,” when used in reference to a disease, disorder, or condition thereof, that would benefit from a reduction in expression of a PRNP gene or production of a PRNP protein, refers to a reduction in the likelihood that a subject will develop a symptom associated with such a disease, disorder, or condition, e.g., a symptom of a PRNP-associated disease. The failure to develop a disease, disorder, or condition, or the reduction in the development of a symptom associated with such a disease, disorder, or condition, e.g., by at least about 10% on a clinically accepted scale for that disease or disorder, or the exhibition of delayed symptoms delayed (e.g., by days, weeks, months or years) is considered effective prevention.

[0215] As used herein, the term “PRNP-associated disease” or “PRNP-associated disorder” is understood as any disease or disorder that would benefit from reduction in the expression or activity of PRNP. Such PRNP-associated diseases are characterized by increasing deposition of the abnormally folded scrapie form of PrP protein (PrP^{sc}) in areas of the brain associated with neuronal cell death in such diseases, e.g., prion diseases, such as a genetic prion disease, e.g., Creutzfeldt-Jakob disease (CJD), Gerstmann-Straussler-Scheinker syndrome (GSS), and fatal familial insomnia (FFI), a sporadic prion disease, e.g., sporadic Creutzfeldt-Jakob disease, Sporadic Fatal Insomnia (sFI), and Variably Proteinase-Sensitive Prionopathy (VPSPr), or an acquired prion disease, e.g., Iatrogenic CJD (iCJD), Kuru, and Variant CJD (vCJD).

[0216] In one embodiment, a PRNP-associated disease is prion disease. Prion disease is a chronic neurodegenerative disease and is caused by abnormal prions, microscopic infectious agents made of protein. Prions cause a number of diseases in a variety of mammals, including bovine spongiform encephalopathy (BSE or mad cow disease) in cattle and scrapie in sheep. Spongiform refers to the characteristic appearance of infected brains, which become filled with holes until they resemble sponges when examined under a microscope. There are three different subtypes of prion disease categorized by how the disease is contracted. All differ slightly with regards to typical signs, symptoms and duration of illness. The subtypes are sporadic, genetic and acquired. In some embodiments, the PRNP-associated disease is a genetic prion disease, e.g., familial Creutzfeldt-Jakob disease (CJD), Gerstmann-Straussler-Scheinker syndrome (GSS), and fatal familial insomnia (FFI). In some embodiments, the PRNP-associated disease is a sporatic prion disease, e.g., sporadic Creutzfeldt-Jakob disease, sporadic fatal insomnia. In other embodiments, the PRNP-associated disease is an acquired prion disease, e.g., iatogenic Creutzfeldt-Jakob disease, variant Creutzfeldt-Jakob disease or Kuru.

[0217] Prion disease usually starts slowly and gradually worsens over time. The common symptoms of prion disease include difficulties with thinking, memory andjudgment, personality changes such as apathy, agitation and depression, confusion or disorientation (including easily getting lost), involuntary muscle spasms (myoclonus), loss of coordination (ataxia), trouble sleeping (insomnia), difficult or slurred speech and impaired vision or blindness. As a person's condition declines, they often withdraw from family and society. Gradually, bodily functions are lost, ultimately leading to death.

[0218] Creutzfeldt-Jakob disease (CJD) is the most common of the known human prion disease. CJD is a rare, degenerative, fatal brain disorder. It affects about one person in every one million per year worldwide; in the United States there are about 350 cases per year. CJD usually appears in later life and runs a rapid course. Typical onset of symptoms occurs at about age 60, and about 70 percent of individuals die within one year. In the early stages of the disease, people may have failing memory, behavioral changes, lack of coordination, and visual disturbances. As the illness progresses, mental deterioration becomes pronounced and involuntary movements, blindness, weakness of extremities, and coma may occur.

[0219] There are three major categories of CJD. In sporadic CJD, the disease appears even though the person has no known risk factors for the disease. This is by far the most common type of CJD and accounts for at least 85 percent of cases. In genetic CJD, the person may have a family history of the disease and test positive for a genetic mutation associated with CJD. About 10 to 15 percent of cases of CJD in the United States are hereditary. In acquired CJD, the disease is transmitted by exposure to brain or nervous system tissue, usually through certain medical procedures. There is no evidence that CJD is contagious through casual contact with someone who has CJD. Since CJD was first described in 1920, fewer than one percent of cases have been acquired CJD. A type of CJD called variant CJD (or vCJD) can be acquired by eating meat from cattle affected by a disease similar to CJD called bovine spongiform encephalopathy (BSE) or, commonly, “mad cow” disease.

[0220] CJD is characterized by rapidly progressive dementia. Initially, individuals experience problems with muscle coordination, personality changes (including impaired memory, judgment, and thinking), and impaired vision. People with the disease, especially with FFI, also may experience insomnia, depression, or unusual sensations. As the illness progresses, peoples' mental impairment becomes severe. They often develop involuntary muscle jerks called myoclonus, and they may go blind. They eventually lose the ability to move and speak, and enter a coma. Pneumonia and other infections often occur in these individuals and can lead to death. Variant CJD begins primarily with psychiatric symptoms, affects younger individuals than other types of CJD, and has a longer than usual duration from onset of symptoms to death.

[0221] Some symptoms of CJD can be similar to symptoms of other progressive neurological disorders, such as Alzheimer's and Huntington's disease. However, CJD causes unique changes in brain tissue which can be seen at autopsy. It also tends to cause more rapid deterioration of a person's abilities than Alzheimer's disease or most other types of dementia.

[0222] “Therapeutically effective amount,” as used herein, is intended to include the amount of an RNAi agent that, when administered to a subject having a PRNP-associated disease, is sufficient to effect treatment of the disease (e.g., by diminishing, ameliorating, or maintaining the existing disease or one or more symptoms of disease). The “therapeutically effective amount” may vary depending on the RNAi agent, how the agent is administered, the disease and its severity and the history, age, weight, family history, genetic makeup, the types of preceding or concomitant treatments, if any, and other individual characteristics of the subject to be treated.

[0223] “Prophylactically effective amount,” as used herein, is intended to include the amount of a RNAi agent that, when administered to a subject having a PRNP-associated disorder, is sufficient to prevent or ameliorate the disease or one or more symptoms of the disease. Ameliorating the disease includes slowing the course of the disease or reducing the severity of later-developing disease. The “prophylactically effective amount” may vary depending on the RNAi agent, how the agent is administered, the degree of risk of disease, and the history, age, weight, family history, genetic makeup, the types of preceding or concomitant treatments, if any, and other individual characteristics of the patient to be treated.

[0224] A “therapeutically-effective amount” or “prophylacticaly effective amount” also includes an amount of a RNAi agent that produces some desired local or systemic effect at a reasonable benefit/risk ratio applicable to any treatment. A RNAi agent employed in the methods of the present disclosure may be administered in a sufficient amount to produce a reasonable benefit/risk ratio applicable to such treatment.

[0225] The phrase “pharmaceutically acceptable” is employed herein to refer to those compounds, materials (including salts), compositions, or dosage forms which are, within the scope of sound medical judgment, suitable for use in contact with the tissues of human subjects and animal subjects without excessive toxicity, irritation, allergic response, or other problem or complication, commensurate with a reasonable benefit/risk ratio.

[0226] The phrase “pharmaceutically-acceptable carrier” as used herein means a pharmaceutically-acceptable material, composition or vehicle, such as a liquid or solid filler, diluent, excipient, manufacturing aid (e.g., lubricant, talc magnesium, calcium or zinc stearate, or steric acid), or solvent encapsulating material, involved in carrying or transporting the subject compound from one organ, or portion of the body, to another organ, or portion of the body. Each carrier must be “acceptable” in the sense of being compatible with the other ingredients of the formulation and not injurious to the subject being treated. Some examples of materials which can serve as pharmaceutically-acceptable carriers include: (1) sugars, such as lactose, glucose and sucrose; (2) starches, such as corn starch and potato starch; (3) cellulose, and its derivatives, such as sodium carboxymethyl cellulose, ethyl cellulose and cellulose acetate; (4) powdered tragacanth; (5) malt; (6) gelatin; (7) lubricating agents, such as magnesium state, sodium lauryl sulfate and talc; (8) excipients, such as cocoa butter and suppository waxes; (9) oils, such as peanut oil, cottonseed oil, safflower oil, sesame oil, olive oil, corn oil and soybean oil; (10) glycols, such as propylene glycol; (11) polyols, such as glycerin, sorbitol, mannitol and polyethylene glycol; (12) esters, such as ethyl oleate and ethyl laurate; (13) agar; (14) buffering agents, such as magnesium hydroxide and aluminum hydroxide; (15) alginic acid; (16) pyrogen-free water; (17) isotonic saline; (18) Ringer's solution; (19) ethyl alcohol; (20) pH buffered solutions; (21) polyesters, polycarbonates or polyanhydrides; (22) bulking agents, such as polypeptides and amino acids (23) serum component, such as serum albumin, HDL and LDL; and (22) other non-toxic compatible substances employed in pharmaceutical formulations.

[0227] The term “sample,” as used herein, includes a collection of similar fluids, cells, or tissues isolated from a subject, as well as fluids, cells, or tissues present within a subject. Examples of biological fluids include blood, serum and serosal fluids, plasma, cerebrospinal fluid, ocular fluids, lymph, urine, saliva, and the like. Tissue samples may include samples from tissues, organs or localized regions. For example, samples may be derived from particular organs, parts of organs, or fluids or cells within those organs. In certain embodiments, samples may be derived from the brain (e.g., whole brain or certain segments of brain, e.g., striatum, or certain types of cells in the brain, such as, e.g., neurons and glial cells (astrocytes, oligodendrocytes, microglial cells)). In other embodiments, a “sample derived from a subject” refers to liver tissue (or subcomponents thereof) derived from the subject. In some embodiments, a “sample derived from a subject” refers to blood drawn from the subject or plasma or serum derived therefrom. In further embodiments, a “sample derived from a subject” refers to brain tissue (or subcomponents thereof) or retinal tissue (or subcomponents thereof) derived from the subject.

### II. RNAi Agents of the Disclosure

[0228] Described herein are RNAi agents which inhibit the expression of a PRNP gene. In one embodiment, the RNAi agent includes double stranded ribonucleic acid (dsRNA) molecules for inhibiting the expression of a PRNP gene in a cell, such as a cell within a subject, e.g., a mammal, such as a human having a PRNP-associated disease, e.g., a prion disease, such as a genetic prion disease, e.g., familial Creutzfeldt-Jakob disease (CJD), Gerstmann-Straussler-Scheinker syndrome (GSS), and fatal familial insomnia (FFI); a sporadic prion disease, e.g., sporadic Creutzfeldt-Jakob disease, Sporadic Fatal Insomnia (sFI), and Variably Proteinase-Sensitive Prionopathy (VPSPr); or an acquired prion disease, e.g., Iatrogenic CJD (iCJD), Kuru, and Variant CJD (vCJD).

[0229] The dsRNA includes an antisense strand having a region of complementarity which is complementary to at least a part of an mRNA formed in the expression of a PRNP gene. The region of complementarity is about 15-30 nucleotides or less in length. Upon contact with a cell expressing the PRNP gene, the RNAi agent inhibits the expression of the PRNP gene (e.g., a human gene, a primate gene, a non-primate gene) by at least 50% as assayed by, for example, a PCR or branched DNA (bDNA)-based method, or by a protein-based method, such as by immunofluorescence analysis, using, for example, western blotting or flowcytometric techniques. In certain embodiments, inhibition of expression is by at least 50% as assayed by the Dual-Glo lucifierase assay in Example lwhere the siRNA is at a 10 nM concentration.

[0230] A dsRNA includes two RNA strands that are complementary and hybridize to form a duplex structure under conditions in which the dsRNA will be used. One strand of a dsRNA (the antisense strand) includes a region of complementarity that is substantially complementary, and generally fully complementary, to a target sequence. The target sequence can be derived from the sequence of an mRNA formed during the expression of a PRNP gene. The other strand (the sense strand) includes a region that is complementary to the antisense strand, such that the two strands hybridize and form a duplex structure when combined under suitable conditions. As described elsewhere herein and as known in the art, the complementary sequences of a dsRNA can also be contained as self-complementary regions of a single nucleic acid molecule, as opposed to being on separate oligonucleotides.

[0231] Generally, the duplex structure is 15 to 30 base pairs in length, e.g., 15-29, 15-28, 15-27, 15-26, 15-25, 15-24, 15-23, 15-22, 15-21, 15-20, 15-19, 15-18, 15-17, 18-30, 18-29, 18-28, 18-27, 18-26, 18-25, 18-24, 18-23, 18-22, 18-21, 18-20, 19-30, 19-29, 19-28, 19-27, 19-26, 19-25, 19-24, 19-23, 19-22, 19-21, 19-20, 20-30, 20-29, 20-28, 20-27, 20-26, 20-25, 20-24,20-23, 20-22, 20-21, 21-30, 21-29, 21-28, 21-27, 21-26, 21-25, 21-24, 21-23, or 21-22 base pairs in length. In certain embodiments, the duplex structure is 18 to 25 base pairs in length, e.g., 18-25, 18-24, 18-23, 18-22, 18-21, 18-20, 19-25, 19-24, 19-23, 19-22, 19-21, 19-20, 20-25, 20-24,20-23, 20-22, 20-21, 21-25, 21-24, 21-23, 21-22, 22-25, 22-24, 22-23, 23-25, 23-24 or 24-25 base pairs in length, for example, 19-21 basepairs in length. Ranges and lengths intermediate to the above recited ranges and lengths are also contemplated to be part of the disclosure.

[0232] Similarly, the region of complementarity to the target sequence is 15 to 30 nucleotides in length, e.g., 15-29, 15-28, 15-27, 15-26, 15-25, 15-24, 15-23, 15-22, 15-21, 15-20, 15-19, 15-18, 15-17, 18-30, 18-29, 18-28, 18-27, 18-26, 18-25, 18-24, 18-23, 18-22, 18-21, 18-20, 19-30, 19-29, 19-28, 19-27, 19-26, 19-25, 19-24, 19-23, 19-22, 19-21, 19-20, 20-30, 20-29, 20-28, 20-27, 20-26, 20-25, 20-24,20-23, 20-22, 20-21, 21-30, 21-29, 21-28, 21-27, 21-26, 21-25, 21-24, 21-23, or 21-22 nucleotides in length, for example 19-23 nucleotides in length or 21-23 nucleotides in length. Ranges and lengths intermediate to the above recited ranges and lengths are also contemplated to be part of the disclosure.

[0233] In some embodiments, the duplex structure is 19 to 30 base pairs in length. Similarly, the region of complementarity to the target sequence is 19 to 30 nucleotides in length.

[0234] In some embodiments, the dsRNA is 15 to 23 nucleotides in length, or 25 to 30 nucleotides in length. In general, the dsRNA is long enough to serve as a substrate for the Dicer enzyme. For example, it is well known in the art that dsRNAs longer than about 21-23 nucleotides can serve as substrates for Dicer. As the ordinarily skilled person will also recognize, the region of an RNA targeted for cleavage will most often be part of a larger RNA molecule, often an mRNA molecule. Where relevant, a “part” of an mRNA target is a contiguous sequence of an mRNA target of sufficient length to allow it to be a substrate for RNAi-directed cleavage (i.e., cleavage through a RISC pathway).

[0235] One of skill in the art will also recognize that the duplex region is a primary functional portion of a dsRNA, e.g., a duplex region of about 15 to 36 base pairs, e.g., 15-36, 15-35, 15-34, 15-33, 15-32, 15-31, 15-30, 15-29, 15-28, 15-27, 15-26, 15-25, 15-24, 15-23, 15-22, 15-21, 15-20, 15-19, 15-18, 15-17, 18-30, 18-29, 18-28, 18-27, 18-26, 18-25, 18-24, 18-23, 18-22, 18-21, 18-20, 19-30, 19-29, 19-28, 19-27, 19-26, 19-25, 19-24, 19-23, 19-22, 19-21, 19-20, 20-30, 20-29, 20-28, 20-27, 20-26, 20-25, 20-24,20-23, 20-22, 20-21, 21-30, 21-29, 21-28, 21-27, 21-26, 21-25, 21-24, 21-23, or 21-22 base pairs, for example, 19-21 base pairs. Thus, in one embodiment, to the extent that it becomes processed to a functional duplex, of e.g., 15-30 base pairs, that targets a desired RNA for cleavage, an RNA molecule or complex of RNA molecules having a duplex region greater than 30 base pairs is a dsRNA. Thus, an ordinarily skilled artisan will recognize that in one embodiment, a miRNA is a dsRNA. In another embodiment, a dsRNA is not a naturally occurring miRNA. In another embodiment, a RNAi agent useful to target PRNP expression is not generated in the target cell by cleavage of a larger dsRNA.

[0236] A dsRNA as described herein can further include one or more single-stranded nucleotide overhangs e.g., 1, 2, 3, or 4 nucleotides. A nucleotide overhang can comprise or consist of a nucleotide/nucleoside analog, including a deoxynucleotide/nucleoside. The overhang(s) can be on the sense strand, the antisense strand or any combination thereof. Furthermore, the nucleotide(s) of an overhang can be present on the 5′-end, 3′-end or both ends of either an antisense or sense strand of a dsRNA. In certain embodiments, longer, extended overhangs are possible.

[0237] A dsRNA can be synthesized by standard methods known in the art as further discussed below, e.g., by use of an automated DNA synthesizer, such as are commercially available from, for example, Biosearch, Applied Biosystems, Inc.

[0238] iRNA compounds of the invention may be prepared using a two-step procedure. First, the individual strands of the double stranded RNA molecule are prepared separately. Then, the component strands are annealed. The individual strands of the siRNA compound can be prepared using solution-phase or solid-phase organic synthesis or both. Organic synthesis offers the advantage that the oligonucleotide strands comprising unnatural or modified nucleotides can be easily prepared. Single-stranded oligonucleotides of the invention can be prepared using solution-phase or solid-phase organic synthesis or both.

[0239] An siRNA can be produced, e.g., in bulk, by a variety of methods. Exemplary methods include: organic synthesis and RNA cleavage, e.g., in vitro cleavage.

[0240] An siRNA can be made by separately synthesizing a single stranded RNA molecule, or each respective strand of a double-stranded RNA molecule, after which the component strands can then be annealed.

[0241] A large bioreactor, e.g., the OligoPilot II from Pharmacia Biotec AB (Uppsala Sweden), can be used to produce a large amount of a particular RNA strand for a given siRNA. The OligoPilotII reactor can efficiently couple a nucleotide using only a 1.5 molar excess of a phosphoramidite nucleotide. To make an RNA strand, ribonucleotides amidites are used. Standard cycles of monomer addition can be used to synthesize the 21 to 23 nucleotide strand for the siRNA. Typically, the two complementary strands are produced separately and then annealed, e.g., after release from the solid support and deprotection.

[0242] Organic synthesis can be used to produce a discrete siRNA species. The complementary of the species to a PRNP gene can be precisely specified. For example, the species may be complementary to a region that includes a polymorphism, e.g., a single nucleotide polymorphism. Further the location of the polymorphism can be precisely defined. In some embodiments, the polymorphism is located in an internal region, e.g., at least 4, 5, 7, or 9 nucleotides from one or both of the termini.

[0243] In one embodiment, RNA generated is carefully purified to remove endsiRNA is cleaved in vitro into siRNAs, for example, using a Dicer or comparable RNAse III-based activity. For example, the dsiRNA can be incubated in an in vitro extract from Drosophila or using purified components, e.g., a purified RNAse or RISC complex (RNA-induced silencing complex). See, e.g., Ketting et al. Genes Dev 2001 Oct. 15; 15(20):2654-9 and Hammond Science 2001 Aug. 10; 293(5532):1146-50.

[0244] dsiRNA cleavage generally produces a plurality of siRNA species, each being a particular 21 to 23 nt fragment of a source dsiRNA molecule. For example, siRNAs that include sequences complementary to overlapping regions and adjacent regions of a source dsiRNA molecule may be present.

[0245] Regardless of the method of synthesis, the siRNA preparation can be prepared in a solution (e.g., an aqueous or organic solution) that is appropriate for formulation. For example, the siRNA preparation can be precipitated and redissolved in pure double-distilled water, and lyophilized. The dried siRNA can then be resuspended in a solution appropriate for the intended formulation process.

[0246] In one aspect, a dsRNA of the disclosure includes at least two nucleotide sequences, a sense sequence and an antisense sequence. The sense strand sequence for PRNP may be selected from the group of sequences provided in any one of Tables 2-3, and the corresponding nucleotide sequence of the antisense strand of the sense strand may be selected from the group of sequences of any one of Tables 2-3. In this aspect, one of the two sequences is complementary to the other of the two sequences, with one of the sequences being substantially complementary to a sequence of an mRNA generated in the expression of a PRNP gene. As such, in this aspect, a dsRNA will include two oligonucleotides, where one oligonucleotide is described as the sense strand (passenger strand) in any one of Tables 2-3, and the second oligonucleotide is described as the corresponding antisense strand (guide strand) of the sense strand in any one of Tables 2-3 for PRNP.

[0247] In one embodiment, the substantially complementary sequences of the dsRNA are contained on separate oligonucleotides. In another embodiment, the substantially complementary sequences of the dsRNA are contained on a single oligonucleotide.

[0248] It will be understood that, although the sequences provided herein are described as modified or conjugated sequences, the RNA of the RNAi agent of the disclosure e.g., a dsRNA of the disclosure, may comprise any one of the sequences set forth in any one of Tables 2-3 that is un-modified, un-conjugated, or modified or conjugated differently than described therein. One or more lipophilic ligands or one or more GalNAc ligands can be included in any of the positions of the RNAi agents provided in the instant application.

[0249] The skilled person is well aware that dsRNAs having a duplex structure of about 20 to 23 base pairs, e.g., 21, base pairs have been hailed as particularly effective in inducing RNA interference (Elbashir et al., (2001) EMBO J., 20:6877-6888). However, others have found that shorter or longer RNA duplex structures can also be effective (Chu and Rana (2007) RNA 14:1714-1719; Kim et al. (2005) Nat Biotech 23:222-226). In the embodiments described above, by virtue of the nature of the oligonucleotide sequences provided herein, dsRNAs described herein can include at least one strand of a length of minimally 21 nucleotides. It can be reasonably expected that shorter duplexes minus only a few nucleotides on one or both ends can be similarly effective as compared to the dsRNAs described above. Hence, dsRNAs having a sequence of at least 15, 16, 17, 18, 19, 20, or more contiguous nucleotides derived from one of the sequences provided herein, and differing in their ability to inhibit the expression of a PRNP gene by not more than 10, 15, 20, 25, or 30% inhibition from a dsRNA comprising the full sequence using the in vitro assay with Cos7 and a 10 nM concentration of the RNA agent and the PCR assay as provided in the examples herein, are contemplated to be within the scope of the present disclosure.

[0250] In addition, the RNAs described herein identify a site(s) in a PRNP transcript that is susceptible to RISC-mediated cleavage. As such, the present disclosure further features RNAi agents that target within this site(s). As used herein, a RNAi agent is said to target within a particular site of an RNA transcript if the RNAi agent promotes cleavage of the transcript anywhere within that particular site. Such a RNAi agent will generally include at least about 15 contiguous nucleotides, such as at least 19 nucleotides, from one of the sequences provided herein coupled to additional nucleotide sequences taken from the region contiguous to the selected sequence in a PRNP gene.

[0251] An RNAi agent as described herein can contain one or more mismatches to the target sequence. In one embodiment, an RNAi agent as described herein contains no more than 3 mismatches (i.e., 3, 2, 1, or 0 mismatches). In one embodiment, an RNAi agent as described herein contains no more than 2 mismatches. In one embodiment, an RNAi agent as described herein contains no more than 1 mismatch. In one embodiment, an RNAi agent as described herein contains 0 mismatches. In certain embodiments, if the antisense strand of the RNAi agent contains mismatches to the target sequence, the mismatch can optionally be restricted to be within the last 5 nucleotides from either the 5′- or 3′-end of the region of complementarity. For example, in such embodiments, for a 23 nucleotide RNAi agent, the strand which is complementary to a region of a PRNP gene generally does not contain any mismatch within the central 13 nucleotides. The methods described herein or methods known in the art can be used to determine whether an RNAi agent containing a mismatch to a target sequence is effective in inhibiting the expression of a PRNP gene. Consideration of the efficacy of RNAi agents with mismatches in inhibiting expression of a PRNP gene is important, especially if the particular region of complementarity in a PRNP gene is known to have polymorphic sequence variation within the population.

### III. Modified RNAi Agents of the Disclosure

[0252] In one embodiment, the RNA of the RNAi agent of the disclosure e.g., a dsRNA, is un-modified, and does not comprise, e.g., chemical modifications or conjugations known in the art and described herein. In certain embodiments, the RNA of an RNAi agent of the disclosure, e.g., a dsRNA, is chemically modified to enhance stability or other beneficial characteristics. In certain embodiments of the disclosure, substantially all of the nucleotides of an RNAi agent of the disclosure are modified. In other embodiments of the disclosure, all of the nucleotides of an RNAi agent of the disclosure are modified. RNAi agents of the disclosure in which “substantially all of the nucleotides are modified” are largely but not wholly modified and can include not more than 5, 4, 3, 2, or 1 unmodified nucleotides. In still other embodiments of the disclosure, RNAi agents of the disclosure can include not more than 5, 4, 3, 2 or 1 modified nucleotides.

[0253] The nucleic acids featured in the disclosure can be synthesized or modified by methods well established in the art, such as those described in “Current protocols in nucleic acid chemistry,” Beaucage, S. L. et al. (Edrs.), John Wiley & Sons, Inc., New York, NY, USA, which is hereby incorporated herein by reference. Modifications include, for example, end modifications, e.g., 5′-end modifications (phosphorylation, conjugation, inverted linkages) or 3′-end modifications (conjugation, DNA nucleotides, inverted linkages, etc.); base modifications, e.g., replacement with stabilizing bases, destabilizing bases, or bases that base pair with an expanded repertoire of partners, removal of bases (abasic nucleotides), or conjugated bases; sugar modifications (e.g., at the 2′-position or 4′-position) or replacement of the sugar; or backbone modifications, including modification or replacement of the phosphodiester linkages. Specific examples of RNAi agents useful in the embodiments described herein include, but are not limited to, RNAs containing modified backbones or no natural internucleoside linkages. RNAs having modified backbones include, among others, those that do not have a phosphorus atom in the backbone. For the purposes of this specification, and as sometimes referenced in the art, modified RNAs that do not have a phosphorus atom in their internucleoside backbone can also be considered to be oligonucleosides. In some embodiments, a modified RNAi agent will have a phosphorus atom in its internucleoside backbone.

[0254] Modified RNA backbones include, for example, phosphorothioates, chiral phosphorothioates, phosphorodithioates, phosphotriesters, aminoalkylphosphotriesters, methyl and other alkyl phosphonates including 3-alkylene phosphonates and chiral phosphonates, phosphinates, phosphoramidates including 3′-amino phosphoramidate and aminoalkylphosphoramidates, thionophosphoramidates, thionoalkylphosphonates, thionoalkylphosphotriesters, and boranophosphates having normal 3′-5′ linkages, 2′-5′-linked analogs of these, and those having inverted polarity wherein the adjacent pairs of nucleoside units are linked 3′-5′ to 5′-3′ or 2′-5′ to 5′-2′. Various salts, e.g., sodium salts, mixed salts and free acid forms are also included.

[0255] Representative U.S. patents that teach the preparation of the above phosphorus-containing linkages include, but are not limited to, U.S. Pat. Nos. 3,687,808; 4,469,863; 4,476,301; 5,023,243; 5,177,195; 5,188,897; 5,264,423; 5,276,019; 5,278,302; 5,286,717; 5,321,131; 5,399,676; 5,405,939; 5,453,496; 5,455,233; 5,466,677; 5,476,925; 5,519,126; 5,536,821; 5,541,316; 5,550,111; 5,563,253; 5,571,799; 5,587,361; 5,625,050; 6,028,188; 6,124,445; 6,160,109; 6,169,170; 6,172,209; 6,239,265; 6,277,603; 6,326,199; 6,346,614; 6,444,423; 6,531,590; 6,534,639; 6,608,035; 6,683,167; 6,858,715; 6,867,294; 6,878,805; 7,015,315; 7,041,816; 7,273,933; 7,321,029; and U.S. Pat. RE39464, the entire contents of each of which are hereby incorporated herein by reference.

[0256] Modified RNA backbones that do not include a phosphorus atom therein have backbones that are formed by short chain alkyl or cycloalkyl internucleoside linkages, mixed heteroatoms and alkyl or cycloalkyl internucleoside linkages, or one or more short chain heteroatomic or heterocyclic internucleoside linkages. These include those having morpholino linkages (formed in part from the sugar portion of a nucleoside); siloxane backbones; sulfide, sulfoxide and sulfone backbones; formacetyl and thioformacetyl backbones; methylene formacetyl and thioformacetyl backbones; alkene containing backbones; sulfamate backbones; methyleneimino and methylenehydrazino backbones; sulfonate and sulfonamide backbones; amide backbones; and others having mixed N, O, S and CH₂ component parts.

[0257] Representative U.S. patents that teach the preparation of the above oligonucleosides include, but are not limited to, U.S. Pat. Nos. 5,034,506; 5,166,315; 5,185,444; 5,214,134; 5,216,141; 5,235,033; 5,64,562; 5,264,564; 5,405,938; 5,434,257; 5,466,677; 5,470,967; 5,489,677; 5,541,307; 5,561,225; 5,596,086; 5,602,240; 5,608,046; 5,610,289; 5,618,704; 5,623,070; 5,663,312; 5,633,360; 5,677,437; and, 5,677,439, the entire contents of each of which are hereby incorporated herein by reference.

[0258] In other embodiments, suitable RNA mimetics are contemplated for use in RNAi agents, in which both the sugar and the internucleoside linkage, i.e., the backbone, of the nucleotide units are replaced with novel groups. The base units are maintained for hybridization with an appropriate nucleic acid target compound. One such oligomeric compound, an RNA mimetic that has been shown to have excellent hybridization properties, is referred to as a peptide nucleic acid (PNA). In PNA compounds, the sugar backbone of an RNA is replaced with an amide containing backbone, in particular an aminoethylglycine backbone. The nucleobases are retained and are bound directly or indirectly to aza nitrogen atoms of the amide portion of the backbone. Representative U.S. patents that teach the preparation of PNA compounds include, but are not limited to, U.S. Pat. Nos. 5,539,082; 5,714,331; and 5,719,262, the entire contents of each of which are hereby incorporated herein by reference. Additional PNA compounds suitable for use in the RNAi agents of the disclosure are described in, for example, in Nielsen et al., Science, 1991, 254, 1497-1500.

[0259] Some embodiments featured in the disclosure include RNAs with phosphorothioate backbones and oligonucleosides with heteroatom backbones, and in particular —CH₂—NH—CH₂—, —CH₂—N(CH₃)—O—CH₂—[known as a methylene (methylimino) or MMI backbone], —CH₂—O—N(CH₃)—CH₂—, —CH₂—N(CH₃)—N(CH₃)—CH₂— and —N(CH₃)—CH₂—CH₂— of the above-referenced U.S. Pat. No. 5,489,677, and the amide backbones of the above-referenced U.S. Pat. No. 5,602,240. In some embodiments, the RNAs featured herein have morpholino backbone structures of the above-referenced U.S. Pat. No. 5,034,506. The native phosphodiester backbone can be represented as —O—P(O)(OH)—OCH₂—.

[0260] Modified RNAs can also contain one or more substituted sugar moieties. The RNAi agents, e.g., dsRNAs, featured herein can include one of the following at the 2′-position: OH; F; O-, S-, or N-alkyl; O-, S-, or N-alkenyl; O-, S- or N-alkynyl; or O-alkyl-O-alkyl, wherein the alkyl, alkenyl and alkynyl can be substituted or unsubstituted C₁ to C₁₀ alkyl or C₂ to C₁₀ alkenyl and alkynyl. Exemplary suitable modifications include O[(CH₂)ₙO]ₘCH₃, O(CH₂)·ₙOCH₃, O(CH₂)ₙNH₂, O(CH₂)ₙCH₃, O(CH₂)ₙONH₂, and O(CH₂)ₙON[(CH₂)ₙCH₃)]₂, where n and m are from 1 to about 10. In other embodiments, dsRNAs include one of the following at the 2′ position: C₁ to C₁₀ lower alkyl, substituted lower alkyl, alkaryl, aralkyl, O-alkaryl or O-aralkyl, SH, SCH₃, OCN, Cl, Br, CN, CF₃, OCF₃, SOCH₃, SO₂CH₃, ONO₂, NO₂, N₃, NH₂, heterocycloalkyl, heterocycloalkaryl, aminoalkylamino, polyalkylamino, substituted silyl, an RNA cleaving group, a reporter group, an intercalator, a group for improving the pharmacokinetic properties of a RNAi agent, or a group for improving the pharmacodynamic properties of a RNAi agent, and other substituents having similar properties. In some embodiments, the modification includes a 2′-methoxyethoxy (2′-O—CH₂CH₂OCH₃, also known as 2′-O-(2-methoxyethyl) or 2′-MOE) (Martin et al., Helv. Chim. Acta, 1995, 78:486-504) i.e., an alkoxy-alkoxy group. Another exemplary modification is 2′-dimethylaminooxyethoxy, i.e., a O(CH₂)20N(CH₃)₂ group, also known as 2′-DMAOE, as described in examples herein below, and 2′-dimethylaminoethoxyethoxy (also known in the art as 2′-O-dimethylaminoethoxyethyl or 2′-DMAEOE), i.e., 2′-O—CH₂—O—CH₂—N(CH₃)2. Further exemplary modifications include: 5′-Me-2′-F nucleotides, 5′-Me-2′-OMe nucleotides, 5′-Me-2′-deoxynucleotides, (both R and S isomers in these three families); 2′-alkoxyalkyl; and 2′-NMA (N-methylacetamide).

[0261] Other modifications include 2′-methoxy (2′-OCH₃), 2′-aminopropoxy (2′-OCH₂CH₂CH₂NH₂), 2′-O-hexadecyl, and 2′-fluoro (2′-F). Similar modifications can also be made at other positions on the RNA of a RNAi agent, particularly the 3′ position of the sugar on the 3′ terminal nucleotide or in 2′-5′ linked dsRNAs and the 5′ position of 5′ terminal nucleotide. RNAi agents can also have sugar mimetics such as cyclobutyl moieties in place of the pentofuranosyl sugar. Representative U.S. patents that teach the preparation of such modified sugar structures include, but are not limited to, U.S. Pat. Nos. 4,981,957; 5,118,800; 5,319,080; 5,359,044; 5,393,878; 5,446,137; 5,466,786; 5,514,785; 5,519,134; 5,567,811; 5,576,427; 5,591,722; 5,597,909; 5,610,300; 5,627,053; 5,639,873; 5,646,265; 5,658,873; 5,670,633; and 5,700,920, certain of which are commonly owned with the instant application. The entire contents of each of the foregoing are hereby incorporated herein by reference.

[0262] An RNAi agent of the disclosure can also include nucleobase (often referred to in the art simply as “base”) modifications or substitutions. As used herein, “unmodified” or “natural” nucleobases include the purine bases adenine (A) and guanine (G), and the pyrimidine bases thymine (T), cytosine (C) and uracil (U). Modified nucleobases include other synthetic and natural nucleobases such as 5-methylcytosine (5-me-C), 5-hydroxymethyl cytosine, xanthine, hypoxanthine, 2-aminoadenine, 6-methyl and other alkyl derivatives of adenine and guanine, 2-propyl and other alkyl derivatives of adenine and guanine, 2-thiouracil, 2-thiothymine and 2-thiocytosine, 5-halouracil and cytosine, 5-propynyl uracil and cytosine, 6-azo uracil, cytosine and thymine, 5-uracil (pseudouracil), 4-thiouracil, 8-halo, 8-amino, 8-thiol, 8-thioalkyl, 8-hydroxyl anal other 8-substituted adenines and guanines, 5-halo, particularly 5-bromo, 5-trifluoromethyl and other 5-substituted uracils and cytosines, 7-methylguanine and 7-methyladenine, 8-azaguanine and 8-azaadenine, 7-deazaguanine and 7-daazaadenine and 3-deazaguanine and 3-deazaadenine. Further nucleobases include those disclosed in U.S. Pat. No. 3,687,808, those disclosed in Modified Nucleosides in Biochemistry, Biotechnology and Medicine, Herdewijn, P. ed. Wiley-VCH, 2008; those disclosed in The Concise Encyclopedia Of Polymer Science And Engineering, pages 858-859, Kroschwitz, J. L, ed. John Wiley & Sons, 1990, these disclosed by Englisch et al., (1991) Angewandte Chemie, International Edition, 30:613, and those disclosed by Sanghvi, Y S., Chapter 15, dsRNA Research and Applications, pages 289-302, Crooke, S. T. and Lebleu, B., Ed., CRC Press, 1993. Certain of these nucleobases are particularly useful for increasing the binding affinity of the oligomeric compounds featured in the disclosure. These include 5-substituted pyrimidines, 6-azapyrimidines and N-2, N-6 and 0-6 substituted purines, including 2-aminopropyladenine, 5-propynyluracil and 5-propynylcytosine. 5-methylcytosine substitutions have been shown to increase nucleic acid duplex stability by 0.6-1.2° C. (Sanghvi, Y. S., Crooke, S. T. and Lebleu, B., Eds., dsRNA Research and Applications, CRC Press, Boca Raton, 1993, pp. 276-278) and are exemplary base substitutions, even more particularly when combined with 2′-O-methoxyethyl sugar modifications.

[0263] Representative U.S. patents that teach the preparation of certain of the above noted modified nucleobases as well as other modified nucleobases include, but are not limited to, the above noted U.S. Pat. Nos. 3,687,808, 4,845,205; 5,130,30; 5,134,066; 5,175,273; 5,367,066; 5,432,272; 5,457,187; 5,459,255; 5,484,908; 5,502,177; 5,525,711; 5,552,540; 5,587,469; 5,594,121, 5,596,091; 5,614,617; 5,681,941; 5,750,692; 6,015,886; 6,147,200; 6,166,197; 6,222,025; 6,235,887; 6,380,368; 6,528,640; 6,639,062; 6,617,438; 7,045,610; 7,427,672; and 7,495,088, the entire contents of each of which are hereby incorporated herein by reference.

[0264] An RNAi agent of the disclosure can also be modified to include one or more bicyclic sugar moities. A “bicyclic sugar” is a furanosyl ring modified by a ring formed by the bridging of two carbons, whether adjacent or non-adjacent. A “bicyclic nucleoside” (“BNA”) is a nucleoside having a sugar moiety comprising a ring formed by bridging two carbons, whether adjacent or non-adjacent, of the sugar ring, thereby forming a bicyclic ring system. In certain embodiments, the bridge connects the 4′-carbon and the 2′-carbon of the sugar ring, optionally, via the 2′-acyclic oxygen atom. Thus, in some embodiments an agent of the disclosure may include one or more locked nucleic acids (LNA). A locked nucleic acid is a nucleotide having a modified ribose moiety in which the ribose moiety comprises an extra bridge connecting the 2′ and 4′ carbons. In other words, an LNA is a nucleotide comprising a bicyclic sugar moiety comprising a 4′-CH2-O-2′ bridge. This structure effectively “locks” the ribose in the 3′-endo structural conformation. The addition of locked nucleic acids to siRNAs has been shown to increase siRNA stability in serum, and to reduce off-target effects (Elmen, J. et al., (2005) Nucleic Acids Research 33(1):439-447; Mook, O R. et al., (2007) Mol Canc Ther 6(3):833-843; Grunweller, A. et al., (2003) Nucleic Acids Research 31(12):3185-3193). Examples of bicyclic nucleosides for use in the polynucleotides of the disclosure include without limitation nucleosides comprising a bridge between the 4′ and the 2′ ribosyl ring atoms. In certain embodiments, the antisense polynucleotide agents of the disclosure include one or more bicyclic nucleosides comprising a 4′ to 2′ bridge.

[0265] A locked nucleoside can be represented by the structure (omitting stereochemistry),

[chemical structure]

[0266] wherein B is a nucleobase or modified nucleobase and L is the linking group that joins the 2′-carbon to the 4′-carbon of the ribose ring. Examples of such 4′ to 2′ bridged bicyclic nucleosides, include but are not limited to 4′-(CH2)-O-2′ (LNA); 4′-(CH₂)—S-2′; 4′-(CH₂)2-O-2′ (ENA); 4′-CH(CH3)-O-2′ (also referred to as “constrained ethyl” or “cEt”) and 4′-CH(CH₂OCH₃)—O-2′ (and analogs thereof; see, e.g., U.S. Pat. No. 7,399,845); 4′-C(CH₃)(CH₃)—O-2′ (and analogs thereof; see e.g., U.S. Pat. No. 8,278,283); 4′-CH₂—N(OCH₃)-2′ (and analogs thereof; see e.g., U.S. Pat. No. 8,278,425); 4′-CH₂—O—N(CH₃)-2′ (see, e.g., U.S. Patent Publication No. 2004/0171570); 4′-CH₂—N(R)—O-2′, wherein R is H, C₁-C₁₂ alkyl, or a nitrogen protecting group (see, e.g., U.S. Pat. No. 7,427,672); 4′-CH₂—C(H)(CH₃)-2′ (see, e.g., Chattopadhyaya et al., J. Org. Chem., 2009, 74, 118-134); and 4′-CH₂—C(═CH₂)-2′ (and analogs thereof; see, e.g., U.S. Pat. No. 8,278,426). The entire contents of each of the foregoing are hereby incorporated herein by reference.

[0267] Additional representative US Patents and US Patent Publications that teach the preparation of locked nucleic acid nucleotides include, but are not limited to, the following: U.S. Pat. Nos. 6,268,490; 6,525,191; 6,670,461; 6,770,748; 6,794,499; 6,998,484; 7,053,207; 7,034,133; 7,084,125; 7,399,845; 7,427,672; 7,569,686; 7,741,457; 8,022,193; 8,030,467; 8,278,425; 8,278,426; 8,278,283; US 2008/0039618; and US 2009/0012281, the entire contents of each of which are hereby incorporated herein by reference.

[0268] Any of the foregoing bicyclic nucleosides can be prepared having one or more stereochemical sugar configurations including for example α-L-ribofuranose and β-D-ribofuranose (see WO 99/14226).

[0269] An RNAi agent of the disclosure can also be modified to include one or more constrained ethyl nucleotides. As used herein, a “constrained ethyl nucleotide” or “cEt” is a locked nucleic acid comprising a bicyclic sugar moiety comprising a 4′-CH(CH₃)—O-2′ bridge (i.e., L in the preceding structure). In one embodiment, a constrained ethyl nucleotide is in the S conformation referred to herein as “S-cEt.”

[0270] An RNAi agent of the disclosure may also include one or more “conformationally restricted nucleotides” (“CRN”). CRN are nucleotide analogs with a linker connecting the C2′ and C4′ carbons of ribose or the PRNP and -C5′ carbons of ribose. CRN lock the ribose ring into a stable conformation and increase the hybridization affinity to mRNA. The linker is of sufficient length to place the oxygen in an optimal position for stability and affinity resulting in less ribose ring puckering.

[0271] Representative publications that teach the preparation of certain of the above noted CRN include, but are not limited to, US 2013/0190383; and WO 2013/036868, the entire contents of each of which are hereby incorporated herein by reference.

[0272] In some embodiments, a RNAi agent of the disclosure comprises one or more monomers that are UNA (unlocked nucleic acid) nucleotides. UNA is unlocked acyclic nucleic acid, wherein any of the bonds of the sugar has been removed, forming an unlocked “sugar” residue. In one example, UNA also encompasses monomer with bonds between C1′-C4′ have been removed (i.e. the covalent carbon-oxygen-carbon bond between the C1′ and C4′ carbons). In another example, the C2′-PRNP′ bond (i.e. the covalent carbon-carbon bond between the C2‘ and PRNP’ carbons) of the sugar has been removed (see Nuc. Acids Symp. Series, 52, 133-134 (2008) and Fluiter et al., Mol. Biosyst., 2009, 10, 1039 hereby incorporated by reference).

[0273] Representative U.S. publications that teach the preparation of UNA include, but are not limited to, U.S. Pat. No. 8,314,227; and US Patent Publication Nos. 2013/0096289; 2013/0011922; and 2011/0313020, the entire contents of each of which are hereby incorporated herein by reference.

[0274] Potentially stabilizing modifications to the ends of RNA molecules can include N-(acetylaminocaproyl)-4-hydroxyprolinol (Hyp-C6-NHAc), N-(caproyl-4-hydroxyprolinol (Hyp-C6), N-(acetyl-4-hydroxyprolinol (Hyp-NHAc), thymidine-2′-O-deoxythymidine (ether), N-(aminocaproyl)-4-hydroxyprolinol (Hyp-C6-amino), 2-docosanoyl-uridine-3′-phosphate, inverted 2′-deoxy-modified ribonucleotide, such as inverted dT(idT), inverted dA (idA), and inverted abasic 2′-deoxyribonucleotide (iAb) and others. Disclosure of this modification can be found in WO 2011/005861.

[0275] In one example, the 3′ or 5′ terminal end of a oligonucleotide is linked to an inverted 2′-deoxy-modified ribonucleotide, such as inverted dT(idT), inverted dA (idA), or a inverted abasic 2′-deoxyribonucleotide (iAb). In one particular example, the inverted 2′-deoxy-modified ribonucleotide is linked to the 3′end of an oligonucleotide, such as the 3′-end of a sense strand described herein, where the linking is via a 3′-3′ phosphodiester linkage or a 3′-3′-phosphorothioate linkage.

[0276] In another example, the 3′-end of a sense strand is linked via a 3′-3′-phosphorothioate linkage to an inverted abasic ribonucleotide (iAb). In another example, the 3′-end of a sense strand is linked via a 3′-3′-phosphorothioate linkage to an inverted dA (idA).

[0277] In one particular example, the inverted 2′-deoxy-modified ribonucleotide is linked to the 3′end of an oligonucleotide, such as the 3′-end of a sense strand described herein, where the linking is via a 3-3′ phosphodiester linkage or a 3′-3′-phosphorothioate linkage.

[0278] In another example, the 3′-terminal nucleotides of a sense strand is an inverted dA (idA) and is linked to the preceding nucleotide via a 3′-3′-linkage (e.g., 3′-3′-phosphorothioate linkage).

[0279] Other modifications of a RNAi agent of the disclosure include a 5′ phosphate or 5′ phosphate mimic, e.g., a 5′-terminal phosphate or phosphate mimic on the antisense strand of a RNAi agent. Suitable phosphate mimics are disclosed in, for example US 2012/0157511, the entire contents of which are incorporated herein by reference.

A. Modified RNAi agents Comprising Motifs of the Disclosure

[0280] In certain aspects of the disclosure, the double-stranded RNAi agents of the disclosure include agents with chemical modifications as disclosed, for example, in WO 2013/075035, the entire contents of which are incorporated herein by reference. As shown herein and in WO 2013/075035, one or more motifs of three identical modifications on three consecutive nucleotides may be introduced into a sense strand or antisense strand of an RNAi agent, particularly at or near the cleavage site. In some embodiments, the sense strand and antisense strand of the RNAi agent may otherwise be completely modified. The introduction of these motifs interrupts the modification pattern, if present, of the sense or antisense strand. The RNAi agent may be optionally conjugated with a lipophilic ligand, e.g., a C16 ligand, for instance on the sense strand. The RNAi agent may be optionally modified with a (S)-glycol nucleic acid (GNA) modification, for instance on one or more residues of the antisense strand.

[0281] Accordingly, the disclosure provides double stranded RNAi agents capable of inhibiting the expression of a target gene (i.e., a PRNP gene) in vivo. The RNAi agent comprises a sense strand and an antisense strand. Each strand of the RNAi agent may be 15-30 nucleotides in length. For example, each strand may be 16-30 nucleotides in length, 17-30 nucleotides in length, 25-30 nucleotides in length, 27-30 nucleotides in length, 17-23 nucleotides in length, 17-21 nucleotides in length, 17-19 nucleotides in length, 19-25 nucleotides in length, 19-23 nucleotides in length, 19-21 nucleotides in length, 21-25 nucleotides in length, or 21-23 nucleotides in length. In certain embodiments, each strand is 19-23 nucleotides in length.

[0282] The sense strand and antisense strand typically form a duplex double stranded RNA (“dsRNA”), also referred to herein as an “RNAi agent.” The duplex region of an RNAi agent may be 15-30 nucleotide pairs in length. For example, the duplex region can be 16-30 nucleotide pairs in length, 17-30 nucleotide pairs in length, 27-30 nucleotide pairs in length, 17-23 nucleotide pairs in length, 17-21 nucleotide pairs in length, 17-19 nucleotide pairs in length, 19-25 nucleotide pairs in length, 19-23 nucleotide pairs in length, 19-21 nucleotide pairs in length, 21-25 nucleotide pairs in length, or 21-23 nucleotide pairs in length. In another example, the duplex region is selected from 15, 16, 17, 18, 19, 20, 21, 22, 23, 24, 25, 26, and 27 nucleotides in length. In certain embodiments, the duplex region is 19-21 nucleotide pairs in length.

[0283] In one embodiment, the RNAi agent may contain one or more overhang regions or capping groups at the 3′-end, 5′-end, or both ends of one or both strands. The overhang can be 1-6 nucleotides in length, for instance 2-6 nucleotides in length, 1-5 nucleotides in length, 2-5 nucleotides in length, 1-4 nucleotides in length, 2-4 nucleotides in length, 1-3 nucleotides in length, 2-3 nucleotides in length, or 1-2 nucleotides in length. In certain embodiments, the nucleotide overhang region is 2 nucleotides in length. The overhangs can be the result of one strand being longer than the other, or the result of two strands of the same length being staggered. The overhang can form a mismatch with the target mRNA or it can be complementary to the gene sequences being targeted or can be another sequence. The first and second strands can also be joined, e.g., by additional bases to form a hairpin, or by other non-base linkers.

[0284] In one embodiment, the nucleotides in the overhang region of the RNAi agent can each independently be a modified or unmodified nucleotide including, but no limited to 2′-sugar modified, such as, 2-F, 2′-O-methyl, thymidine (T), and any combinations thereof.

[0285] For example, TT can be an overhang sequence for either end on either strand. The overhang can form a mismatch with the target mRNA or it can be complementary to the gene sequences being targeted or can be another sequence.

[0286] The 5′- or 3′-overhangs at the sense strand, antisense strand or both strands of the RNAi agent may be phosphorylated. In some embodiments, the overhang region(s) contains two nucleotides having a phosphorothioate between the two nucleotides, where the two nucleotides can be the same or different. In one embodiment, the overhang is present at the 3′-end of the sense strand, antisense strand, or both strands. In one embodiment, this 3′-overhang is present in the antisense strand. In one embodiment, this 3′-overhang is present in the sense strand.

[0287] The RNAi agent may contain only a single overhang, which can strengthen the interference activity of the RNAi, without affecting its overall stability. For example, the single-stranded overhang may be located at the 3-terminal end of the sense strand or, alternatively, at the 3-terminal end of the antisense strand. The RNAi may also have a blunt end, located at the 5′-end of the antisense strand (i.e., the 3′-end of the sense strand) or vice versa. Generally, the antisense strand of the RNAi has a nucleotide overhang at the 3′-end, and the 5′-end is blunt. While not wishing to be bound by theory, the asymmetric blunt end at the 5′-end of the antisense strand and 3′-end overhang of the antisense strand favor the guide strand loading into RISC process.

[0288] In one embodiment, the RNAi agent is a double blunt-ended of 19 nucleotides in length, wherein the sense strand contains at least one motif of three 2′-F modifications on three consecutive nucleotides at positions 7, 8, and 9 from the 5′end. The antisense strand contains at least one motif of three 2′-O-methyl modifications on three consecutive nucleotides at positions 11, 12, and 13 from the 5′end.

[0289] In another embodiment, the RNAi agent is a double blunt-ended of 20 nucleotides in length, wherein the sense strand contains at least one motif of three 2′-F modifications on three consecutive nucleotides at positions 8, 9, and 10 from the 5′end. The antisense strand contains at least one motif of three 2′-O-methyl modifications on three consecutive nucleotides at positions 11, 12, and 13 from the 5′end.

[0290] In yet another embodiment, the RNAi agent is a double blunt-ended of 21 nucleotides in length, wherein the sense strand contains at least one motif of three 2′-F modifications on three consecutive nucleotides at positions 9, 10, 11 from the 5′end. The antisense strand contains at least one motif of three 2′-O-methyl modifications on three consecutive nucleotides at positions 11, 12, and 13 from the 5′end.

[0291] In one embodiment, the RNAi agent comprises a 21 nucleotide sense strand and a 23 nucleotide antisense strand, wherein the sense strand contains at least one motif of three 2′-F modifications on three consecutive nucleotides at positions 9, 10, and 11 from the 5′end; the antisense strand contains at least one motif of three 2′-O-methyl modifications on three consecutive nucleotides at positions 11, 12, and 13 from the 5′end, wherein one end of the RNAi agent is blunt, while the other end comprises a 2 nucleotide overhang. In one example, the two nucleotide overhang is at the 3′-end of the antisense strand. When the two nucleotide overhang is at the 3′-end of the antisense strand, there may be two phosphorothioate internucleotide linkages between the terminal three nucleotides, wherein two of the three nucleotides are the overhang nucleotides, and the third nucleotide is a paired nucleotide next to the overhang nucleotide. In one embodiment, the RNAi agent additionally has two phosphorothioate internucleotide linkages between the terminal three nucleotides at both the 5′-end of the sense strand and at the 5′-end of the antisense strand. In one embodiment, every nucleotide in the sense strand and the antisense strand of the RNAi agent, including the nucleotides that are part of the motifs are modified nucleotides. In one embodiment each residue is independently modified with a 2′-O-methyl or 2′-fluoro, e.g., in an alternating motif. Optionally, the RNAi agent further comprises a ligand (e.g., a lipophilic ligand, optionally a C16 ligand).

[0292] In one embodiment, the RNAi agent comprises a sense and an antisense strand, wherein the sense strand is 25-30 nucleotide residues in length, wherein starting from the 5′ terminal nucleotide (position 1) positions 1 to 23 of the first strand comprise at least 8 ribonucleotides; the antisense strand is 36-66 nucleotide residues in length and, starting from the 3′ terminal nucleotide, comprises at least 8 ribonucleotides in the positions paired with positions 1-23 of sense strand to form a duplex; wherein at least the 3′terminal nucleotide of antisense strand is unpaired with sense strand, and up to 6 consecutive 3′ terminal nucleotides are unpaired with sense strand, thereby forming a 3′ single stranded overhang of 1-6 nucleotides; wherein the 5′ terminus of antisense strand comprises from 10-30 consecutive nucleotides which are unpaired with sense strand, thereby forming a 10-30 nucleotide single stranded 5′ overhang; wherein at least the sense strand 5′ terminal and 3′ terminal nucleotides are base paired with nucleotides of antisense strand when sense and antisense strands are aligned for maximum complementarity, thereby forming a substantially duplexed region between sense and antisense strands; and antisense strand is sufficiently complementary to a target RNA along at least 19 ribonucleotides of antisense strand length to reduce target gene expression when the double stranded nucleic acid is introduced into a mammalian cell; and wherein the sense strand contains at least one motif of three 2′-F modifications on three consecutive nucleotides, where at least one of the motifs occurs at or near the cleavage site. The antisense strand contains at least one motif of three 2′-O-methyl modifications on three consecutive nucleotides at or near the cleavage site.

[0293] In one embodiment, the RNAi agent comprises sense and antisense strands, wherein the RNAi agent comprises a first strand having a length which is at least 25 and at most 29 nucleotides and a second strand having a length which is at most 30 nucleotides with at least one motif of three 2′-O-methyl modifications on three consecutive nucleotides at position 11, 12, and 13 from the 5′ end; wherein the 3′ end of the first strand and the 5′ end of the second strand form a blunt end and the second strand is 1-4 nucleotides longer at its 3′ end than the first strand, wherein the duplex region region which is at least 25 nucleotides in length, and the second strand is sufficiently complementary to a target mRNA along at least 19 nucleotide of the second strand length to reduce target gene expression when the RNAi agent is introduced into a mammalian cell, and wherein dicer cleavage of the RNAi agent results in an siRNA comprising the 3′ end of the second strand, thereby reducing expression of the target gene in the mammal. Optionally, the RNAi agent further comprises a ligand.

[0294] In one embodiment, the sense strand of the RNAi agent contains at least one motif of three identical modifications on three consecutive nucleotides, where one of the motifs occurs at the cleavage site in the sense strand.

[0295] In one embodiment, the antisense strand of the RNAi agent can also contain at least one motif of three identical modifications on three consecutive nucleotides, where one of the motifs occurs at or near the cleavage site in the antisense strand.

[0296] For an RNAi agent having a duplex region of 17-23 nucleotide in length, the cleavage site of the antisense strand is typically around the 10, 11 and 12 positions from the 5′-end. Thus the motifs of three identical modifications may occur at the 9, 10, and 11 positions; 10, 11, and 12 positions; 11, 12, and 13 positions; 12, 13, and 14 positions; or 13, 14, and 15 positions of the antisense strand, the count starting from the first nucleotide from the 5′-end of the antisense strand, or, the count starting from the first paired nucleotide within the duplex region from the 5′-end of the antisense strand. The cleavage site in the antisense strand may also change according to the length of the duplex region of the RNAi from the 5′-end.

[0297] The sense strand of the RNAi agent may contain at least one motif of three identical modifications on three consecutive nucleotides at the cleavage site of the strand; and the antisense strand may have at least one motif of three identical modifications on three consecutive nucleotides at or near the cleavage site of the strand. When the sense strand and the antisense strand form a dsRNA duplex, the sense strand and the antisense strand can be so aligned that one motif of the three nucleotides on the sense strand and one motif of the three nucleotides on the antisense strand have at least one nucleotide overlap, i.e., at least one of the three nucleotides of the motif in the sense strand forms a base pair with at least one of the three nucleotides of the motif in the antisense strand. Alternatively, at least two nucleotides may overlap, or all three nucleotides may overlap.

[0298] In one embodiment, the sense strand of the RNAi agent may contain more than one motif of three identical modifications on three consecutive nucleotides. The first motif may occur at or near the cleavage site of the strand and the other motifs may be a wing modification. The term “wing modification” herein refers to a motif occurring at another portion of the strand that is separated from the motif at or near the cleavage site of the same strand. The wing modification is either adajacent to the first motif or is separated by at least one or more nucleotides. When the motifs are immediately adjacent to each other then the chemistry of the motifs are distinct from each other and when the motifs are separated by one or more nucleotide than the chemistries can be the same or different. Two or more wing modifications may be present. For instance, when two wing modifications are present, each wing modification may occur at one end relative to the first motif which is at or near cleavage site or on either side of the lead motif.

[0299] Like the sense strand, the antisense strand of the RNAi agent may contain more than one motif of three identical modifications on three consecutive nucleotides, with at least one of the motifs occurring at or near the cleavage site of the strand. This antisense strand may also contain one or more wing modifications in an alignment similar to the wing modifications that may be present on the sense strand.

[0300] In one embodiment, the wing modification on the sense strand or antisense strand of the RNAi agent typically does not include the first one or two terminal nucleotides at the 3′-end, 5′-end or both ends of the strand.

[0301] In another embodiment, the wing modification on the sense strand or antisense strand of the RNAi agent typically does not include the first one or two paired nucleotides within the duplex region at the 3′-end, 5′-end or both ends of the strand.

[0302] When the sense strand and the antisense strand of the RNAi agent each contain at least one wing modification, the wing modifications may fall on the same end of the duplex region, and have an overlap of one, two or three nucleotides.

[0303] When the sense strand and the antisense strand of the RNAi agent each contain at least two wing modifications, the sense strand and the antisense strand can be so aligned that two modifications each from one strand fall on one end of the duplex region, having an overlap of one, two or three nucleotides; two modifications each from one strand fall on the other end of the duplex region, having an overlap of one, two or three nucleotides; two modifications one strand fall on each side of the lead motif, having an overlap of one, two, or three nucleotides in the duplex region.

[0304] In one embodiment, the RNAi agent comprises mismatch(es) with the target, within the duplex, or combinations thereof. The mistmatch may occur in the overhang region or the duplex region. The base pair may be ranked on the basis of their propensity to promote dissociation or melting (e.g., on the free energy of association or dissociation of a particular pairing, the simplest approach is to examine the pairs on an individual pair basis, though next neighbor or similar analysis can also be used). In terms of promoting dissociation: A:U is preferred over G:C; G:U is preferred over G:C; and I:C is preferred over G:C (I=inosine). Mismatches, e.g., non-canonical or other than canonical pairings (as described elsewhere herein) are preferred over canonical (A:T, A:U, G:C) pairings; and pairings which include a universal base are preferred over canonical pairings.

[0305] In one embodiment, the RNAi agent comprises at least one of the first 1, 2, 3, 4, or 5 base pairs within the duplex regions from the 5′-end of the antisense strand independently selected from the group of: A:U, G:U, I:C, and mismatched pairs, e.g., non-canonical or other than canonical pairings or pairings which include a universal base, to promote the dissociation of the antisense strand at the 5′-end of the duplex.

[0306] In one embodiment, the nucleotide at the 1 position within the duplex region from the 5′-end in the antisense strand is selected from the group consisting of A, dA, dU, U, and dT. Alternatively, at least one of the first 1, 2 or 3 base pair within the duplex region from the 5′-end of the antisense strand is an AU base pair. For example, the first base pair within the duplex region from the 5′-end of the antisense strand is an AU base pair.

[0307] In another embodiment, the nucleotide at the 3′-end of the sense strand is deoxythimidine (dT). In another embodiment, the nucleotide at the 3′-end of the antisense strand is deoxythimidine (dT). In one embodiment, there is a short sequence of deoxythimidine nucleotides, for example, two dT nucleotides on the 3′-end of the sense or antisense strand.

[0308] In one embodiment, the sense strand sequence may be represented by formula (I):

5′ nₚ-Nₐ-(X X X)ᵢ-N_{b}-Y Y Y-N_{b}-(Z Z Z)ⱼ-Nₐ-n_{q} 3′ (I)
[0309] wherein:
[0310] i and j are each independently 0 or 1;
[0311] p and q are each independently 0-6;
[0312] each Nₐ independently represents an oligonucleotide sequence comprising 0-25 modified nucleotides, each sequence comprising at least two differently modified nucleotides;
[0313] each N_{b} independently represents an oligonucleotide sequence comprising 0-10 modified nucleotides;
[0314] each nₚ and n_{q} independently represent an overhang nucleotide;
[0315] wherein N_{b} and Y do not have the same modification; and XXX, YYY and ZZZ each independently represent one motif of three identical modifications on three consecutive nucleotides. In one embodiment, YYY is all 2′-F modified nucleotides.

[0316] In one embodiment, the Nₐ or N_{b} comprise modifications of alternating pattern.

[0317] In one embodiment, the YYY motif occurs at or near the cleavage site of the sense strand. For example, when the RNAi agent has a duplex region of 17-23 nucleotides in length, the YYY motif can occur at or the vicinity of the cleavage site (e.g.: can occur at positions 6, 7, 8, 7, 8, 9, 8, 9, 10, 9, 10, 11, 10, 11,12 or 11, 12, 13) of—the sense strand, the count starting from the 1^{St} nucleotide, from the 5′-end; or optionally, the count starting at the 1′ paired nucleotide within the duplex region, from the 5′-end.

[0318] In one embodiment, i is 1 and j is 0, or i is 0 and j is 1, or both i and j are 1. The sense strand can therefore be represented by the following formulas:

5′ nₚ-Nₐ-YYY-N_{b}-ZZZ-Nₐ-n_{q} 3′ (Ib);

5′ nₚ-Nₐ-XXX-N_{b}-YYY-Nₐ-n_{q} 3′ (Ic); or

5′ nₚ-Nₐ-XXX-N_{b}-YYY-N_{b}-ZZZ-Nₐ-n_{q} 3′ (Id).

[0319] When the sense strand is represented by formula (Ib), N_{b} represents an oligonucleotide sequence comprising 0-10, 0-7, 0-5, 0-4, 0-2 or 0 modified nucleotides.

[0320] Each Nₐ independently can represent an oligonucleotide sequence comprising 2-20, 2-15, or 2-10 modified nucleotides.

[0321] When the sense strand is represented as formula (Ic), N_{b} represents an oligonucleotide sequence comprising 0-10, 0-7, 0-10, 0-7, 0-5, 0-4, 0-2 or 0 modified nucleotides. Each Nₐ can independently represent an oligonucleotide sequence comprising 2-20, 2-15, or 2-10 modified nucleotides.

[0322] When the sense strand is represented as formula (Id), each N_{b} independently represents an oligonucleotide sequence comprising 0-10, 0-7, 0-5, 0-4, 0-2 or 0 modified nucleotides. In one embodiment, N_{b} is 0, 1, 2, 3, 4, 5 or 6. Each Nₐ can independently represent an oligonucleotide sequence comprising 2-20, 2-15, or 2-10 modified nucleotides.

[0323] Each of X, Y and Z may be the same or different from each other.

[0324] In other embodiments, i is 0 and j is 0, and the sense strand may be represented by the formula:

5′ nₚ-Nₐ-YYY-Nₐ-n_{q} 3′ (Ia).

[0325] When the sense strand is represented by formula (Ia), each Nₐ independently can represent an oligonucleotide sequence comprising 2-20, 2-15, or 2-10 modified nucleotides.

[0326] In one embodiment, the antisense strand sequence of the RNAi may be represented by formula (II):

5′ n_{q}′-Nₐ′-(Z′Z′Z′)ₖ-N_{b}′-Y′Y′Y′-N_{b}′-(X′X′X′)ₗ-N′ₐ-nₚ′3′ (II)
[0327] wherein:
[0328] k and l are each independently 0 or 1;
[0329] p′ and q′ are each independently 0-6;
   each Nₐ′ independently represents an oligonucleotide sequence comprising 0-25 modified nucleotides, each sequence comprising at least two differently modified nucleotides;
   each N_{b}′ independently represents an oligonucleotide sequence comprising 0-10 modified nucleotides;
   each nₚ′ and n_{q}′ independently represent an overhang nucleotide;
   wherein N_{b}′ and Y′ do not have the same modification; and
   X′X′X′, Y′Y′Y′ and Z′Z′Z′ each independently represent one motif of three identical modifications on three consecutive nucleotides.

[0330] In one embodiment, the Nₐ′ or N_{b}′ comprise modifications of alternating pattern.

[0331] The Y′Y′Y′ motif occurs at or near the cleavage site of the antisense strand. For example, when the RNAi agent has a duplex region of 17-23 nucleotidein length, the Y′Y′Y′ motif can occur at positions 9, 10, 11; 10, 11, 12; 11, 12, 13; 12, 13, 14; or 13, 14, 15 of the antisense strand, with the count starting from the 1^{st} nucleotide, from the 5′-end; or optionally, the count starting at the 1^{st} paired nucleotide within the duplex region, from the 5′-end. In another emobodiment, the Y′Y′Y′ motif occurs at positions 11, 12, 13.

[0332] In one embodiment, Y′Y′Y′ motif is all 2′-OMe modified nucleotides.

[0333] In one embodiment, k is 1 and 1 is 0, or k is 0 and 1 is 1, or both k and 1 are 1.

[0334] The antisense strand can therefore be represented by the following formulas:

5′ n_{q}′-Nₐ′-Z′Z′Z′-N_{b}′-Y′Y′Y′-Nₐ′-nₚ, 3′ (IIb);

5′ n_{q}′-Nₐ′-Y′Y′Y′-N_{b}′-X′X′X′-nₚ, 3′ (IIc); or

5′ n_{q}′-Nₐ′-Z′Z′Z′-N_{b}′-Y′Y′Y′-N_{b}′-X′X′X′-Nₐ′-n_{p′} 3′ (IId).

[0335] When the antisense strand is represented by formula (IIb), N_{b}′ represents an oligonucleotide sequence comprising 0-10, 0-7, 0-10, 0-7, 0-5, 0-4, 0-2 or 0 modified nucleotides. Each Nₐ′ independently represents an oligonucleotide sequence comprising 2-20, 2-15, or 2-10 modified nucleotides.

[0336] When the antisense strand is represented as formula (IIc), N_{b}′ represents an oligonucleotide sequence comprising 0-10, 0-7, 0-10, 0-7, 0-5, 0-4, 0-2 or 0 modified nucleotides. Each Nₐ′ independently represents an oligonucleotide sequence comprising 2-20, 2-15, or 2-10 modified nucleotides.

[0337] When the antisense strand is represented as formula (IId), each N_{b}′ independently represents an oligonucleotide sequence comprising 0-10, 0-7, 0-10, 0-7, 0-5, 0-4, 0-2 or 0 modified nucleotides. Each Nₐ′ independently represents an oligonucleotide sequence comprising 2-20, 2-15, or 2-10 modified nucleotides. In another embodiment, N_{b} is 0, 1, 2, 3, 4, 5 or 6.

[0338] In other embodiments, k is 0 and 1 is 0 and the antisense strand may be represented by the formula:

5′ n_{p′}-N_{a′}-Y′Y′Y′-N_{a′}-n_{q′}3′ (Ia).

[0339] When the antisense strand is represented as formula (IIa), each Nₐ′ independently represents an oligonucleotide sequence comprising 2-20, 2-15, or 2-10 modified nucleotides.

[0340] Each of X′, Y and Z′ may be the same or different from each other.

[0341] Each nucleotide of the sense strand and antisense strand may be independently modified with LNA, HNA, CeNA, 2′-methoxyethyl, 2′-O-methyl, 2′-O-allyl, 2′-C-allyl, 2′-hydroxyl, or 2′-fluoro. For example, each nucleotide of the sense strand and antisense strand is independently modified with 2′-O-methyl or 2′-fluoro. Each X, Y, Z, X′, Y′ and Z′, in particular, may represent a 2′-O-methyl modification or a 2′-fluoro modification.

[0342] In one embodiment, the sense strand of the RNAi agent may contain YYY motif occurring at 9, 10 and 11 positions of the strand when the duplex region is 21 nt, the count starting from the 1^{st} nucleotide from the 5′-end, or optionally, the count starting at the 1′ paired nucleotide within the duplex region, from the 5′-end; and Y represents 2′-F modification. The sense strand may additionally contain XXX motif or ZZZ motifs as wing modifications at the opposite end of the duplex region; and XXX and ZZZ each independently represents a 2′-OMe modification or 2′-F modification.

[0343] In one embodiment the antisense strand may contain Y′Y′Y′ motif occurring at positions 11, 12, 13 of the strand, the count starting from the 1′ nucleotide from the 5′-end, or optionally, the count starting at the 1′ paired nucleotide within the duplex region, from the 5′-end; and Y′ represents 2′-O-methyl modification. The antisense strand may additionally contain X′X′X′ motif or Z′Z′Z′ motifs as wing modifications at the opposite end of the duplex region; and X′X′X′ and Z′Z′Z′ each independently represents a 2′-OMe modification or 2′-F modification.

[0344] The sense strand represented by any one of the above formulas (Ia), (Ib), (Ic), and (Id) forms a duplex with a antisense strand being represented by any one of formulas (IIa), (IIb), (IIc), and (IId), respectively.

[0345] Accordingly, the RNAi agents for use in the methods of the disclosure may comprise a sense strand and an antisense strand, each strand having 14 to 30 nucleotides, the RNAi duplex represented by formula (III):

sense: 5′ nₚ-Nₐ-(X X X)ᵢ-N_{b}-Y Y Y-N_{b}-(Z Z Z)ⱼ-Nₐ-n_{q} 3′

antisense: 3′nₚ′-Nₐ′-(X′X′X′)ₖ-N_{b}′-Y′Y′Y′-N_{b}′-(Z′Z′Z′)ₗ-Nₐ′-n_{q}′5′ (III)
[0346] wherein:
[0347] i, j, k, and 1 are each independently 0 or 1;
[0348] p, p′, q, and q′ are each independently 0-6;
[0349] each Nₐ and Nₐ′ independently represents an oligonucleotide sequence comprising 0-25 modified nucleotides, each sequence comprising at least two differently modified nucleotides;
[0350] each N_{b} and N_{b}′ independently represents an oligonucleotide sequence comprising 0-10 modified nucleotides;
[0351] wherein
[0352] each nₚ′, nₚ, n_{q}′, and n_{q}, each of which may or may not be present, independently represents an overhang nucleotide; and
[0353] XXX, YYY, ZZZ, X′X′X′, Y′Y′Y′, and Z′Z′Z′ each independently represent one motif of three identical modifications on three consecutive nucleotides.

[0354] In one embodiment, i is 0 and j is 0; or i is 1 and j is 0; or i is 0 and j is 1; or both i and j are 0; or both i and j are 1. In another embodiment, k is 0 and 1 is 0; or k is 1 and 1 is 0; k is 0 and 1 is 1; or both k and 1 are 0; or both k and 1 are 1.

[0355] Exemplary combinations of the sense strand and antisense strand forming a RNAi duplex include the formulas below:

5′ nₚ-Nₐ-Y Y Y-Nₐ-n_{q} 3′

3′ nₚ′-Nₐ′-Y′Y′Y′-Nₐ′n_{q}′ 5′ (IIIa)

5′ nₚ-Nₐ-Y Y Y-N_{b}-Z Z Z-Nₐ-n_{q} 3′

3′′ nₚ′-Nₐ′-Y′Y′Y′-N_{b}′-Z′Z′Z′-Nₐ′n_{q}′5′ (IIIb)

5′ nₚ-Nₐ-X X X-N_{b}-Y Y Y-Nₐ-n_{q} 3′

3′ nₚ′-Nₐ′-X′X′X′-N_{b}′-Y′Y′Y′-Nₐ′-n_{q}′5′ (IIIc)

5′ nₚ-Nₐ-X X X-N_{b}-Y Y Y-N_{b}-Z Z Z-Nₐ-n_{q} 3′

3′ nₚ′-Nₐ′-X′X′X′-N_{b}′-Y′Y′Y′-N_{b}′-Z′Z′Z′-Nₐ-n_{q}′5′ (IIId)

[0356] When the RNAi agent is represented by formula (IIIa), each Nₐ independently represents an oligonucleotide sequence comprising 2-20, 2-15, or 2-10 modified nucleotides.

[0357] When the RNAi agent is represented by formula (IIIb), each N_{b} independently represents an oligonucleotide sequence comprising 1-10, 1-7, 1-5 or 1-4 modified nucleotides. Each Nₐ independently represents an oligonucleotide sequence comprising 2-20, 2-15, or 2-10 modified nucleotides.

[0358] When the RNAi agent is represented as formula (IIIc), each N_{b}, N_{b}′ independently represents an oligonucleotide sequence comprising 0-10, 0-7, 0-10, 0-7, 0-5, 0-4, 0-2 or Omodified nucleotides. Each Nₐ independently represents an oligonucleotide sequence comprising 2-20, 2-15, or 2-10 modified nucleotides.

[0359] When the RNAi agent is represented as formula (IIId), each N_{b}, N_{b}′ independently represents an oligonucleotide sequence comprising 0-10, 0-7, 0-10, 0-7, 0-5, 0-4, 0-2 or 0 modified nucleotides. Each Nₐ, Nₐ′ independently represents an oligonucleotide sequence comprising 2-20, 2-15, or 2-10 modified nucleotides. Each of Nₐ, Nₐ′, N_{b} and N_{b}′ independently comprises modifications of alternating pattern.

[0360] In one embodiment, when the RNAi agent is represented by formula (IIId), the Nₐ modifications are 2′-O-methyl or 2′-fluoro modifications. In another embodiment, when the RNAi agent is represented by formula (IIId), the Nₐ modifications are 2′-O-methyl or 2′-fluoro modifications and nₚ′>0 and at least one nₚ′ is linked to a neighboring nucleotide a via phosphorothioate linkage. In yet another embodiment, when the RNAi agent is represented by formula (IIId), the Nₐ modifications are 2′-O-methyl or 2′-fluoro modifications, nₚ′>0 and at least one nₚ′ is linked to a neighboring nucleotide via phosphorothioate linkage, and the sense strand is conjugated to one or more C16 (or related) moieties attached through a bivalent or trivalent branched linker (described below). In another embodiment, when the RNAi agent is represented by formula (IIId), the Nₐ modifications are 2′-O-methyl or 2′-fluoro modifications, nₚ′>0 and at least one nₚ′ is linked to a neighboring nucleotide via phosphorothioate linkage, the sense strand comprises at least one phosphorothioate linkage, and the sense strand is conjugated to one or more lipophilic, e.g., C16 (or related) moieties, optionally attached through a bivalent or trivalent branched linker.

[0361] In one embodiment, when the RNAi agent is represented by formula (IIIa), the Nₐ modifications are 2′-O-methyl or 2′-fluoro modifications, nₚ′>0 and at least one nₚ′ is linked to a neighboring nucleotide via phosphorothioate linkage, the sense strand comprises at least one phosphorothioate linkage, and the sense strand is conjugated to one or more lipophilic, e.g., C16 (or related) moieties attached through a bivalent or trivalent branched linker.

[0362] In one embodiment, the RNAi agent is a multimer containing at least two duplexes represented by formula (III), (IIIa), (IIb), (IIc), and (IIId), wherein the duplexes are connected by a linker. The linker can be cleavable or non-cleavable. Optionally, the multimer further comprises a ligand. Each of the duplexes can target the same gene or two different genes; or each of the duplexes can target same gene at two different target sites.

[0363] In one embodiment, the RNAi agent is a multimer containing three, four, five, six or more duplexes represented by formula (III), (IIIa), (IIb), (IIc), and (IIId), wherein the duplexes are connected by a linker. The linker can be cleavable or non-cleavable. Optionally, the multimer further comprises a ligand. Each of the duplexes can target the same gene or two different genes; or each of the duplexes can target same gene at two different target sites.

[0364] In one embodiment, two RNAi agents represented by formula (III), (IIIa), (IIb), (IIIc), and (IIId) are linked to each other at the 5′ end, and one or both of the 3′ ends and are optionally conjugated to to a ligand. Each of the agents can target the same gene or two different genes; or each of the agents can target same gene at two different target sites.

[0365] Various publications describe multimeric RNAi agents that can be used in the methods of the disclosure. Such publications include WO2007/091269, WO2010/141511, WO2007/117686, WO2009/014887, and WO2011/031520; and U.S. Pat. No. 7,858,769, the entire contents of each of which are hereby incorporated herein by reference.

[0366] In certain embodiments, the compositions and methods of the disclosure include a vinyl phosphonate (VP) modification of an RNAi agent as described herein. In exemplary embodiments, a 5′-vinyl phosphonate modified nucleotide of the disclosure has the structure:

[chemical structure]

wherein X is O or S;
[0367] R is hydrogen, hydroxy, fluoro, or C₁₋₂₀alkoxy (e.g., methoxy or n-hexadecyloxy);
[0368] R^{5′} is ═C(H)—P(O)(OH)2 and the double bond between the C5′ carbon and R^{5′} is in the E or Z orientation (e.g., E orientation); and
[0369] B is a nucleobase or a modified nucleobase, optionally where B is adenine, guanine, cytosine, thymine, or uracil.
[0370] In one embodiment, R^{5′} is ═C(H)—P(O)(OH)2 and the double bond between the C5′ carbon and R5′ is in the E orientation. In another embodiment, R is methoxy and R^{5′} is ═C(H)—P(O)(OH)₂ and the double bond between the C5′ carbon and R5′ is in the E orientation. In another embodiment, X is S, R is methoxy, and R^{5′} is ═C(H)—P(O)(OH)2 and the double bond between the C5′ carbon and R5′ is in the E orientation.

[0371] A vinyl phosphonate of the instant disclosure may be attached to either the antisense or the sense strand of a dsRNA of the disclosure. In certain embodiments, a vinyl phosphonate of the instant disclosure is attached to the antisense strand of a dsRNA, optionally at the 5′ end of the antisense strand of the dsRNA.

[0372] Vinyl phosphate modifications are also contemplated for the compositions and methods of the instant disclosure. An exemplary vinyl phosphate structure includes the preceding structure, where R^{5′} is ═C(H)—OP(O)(OH)₂ and the double bond between the C5′ carbon and R^{5′} is in the E or Z orientation (e.g., E orientation).

[0373] A. Thermally Destabilizing Modifications

[0374] In certain embodiments, a dsRNA molecule can be optimized for RNA interference by incorporating thermally destabilizing modifications in the seed region of the antisense strand. As used herein “seed region” means at positions 2-9 of the 5′-end of the referenced strand. For example, thermally destabilizing modifications can be incorporated in the seed region of the antisense strand to reduce or inhibit off-target gene silencing.

[0375] The term “thermally destabilizing modification(s)” includes modification(s) that would result with a dsRNA with a lower overall melting temperature (Tₘ) than the Tₘ of the dsRNA without having such modification(s). For example, the thermally destabilizing modification(s) can decrease the Tₘ of the dsRNA by 1-4° C., such as one, two, three or four degrees Celcius. And, the term “thermally destabilizing nucleotide” refers to a nucleotide containing one or more thermally destabilizing modifications.

[0376] It has been discovered that dsRNAs with an antisense strand comprising at least one thermally destabilizing modification of the duplex within the first 9 nucleotide positions, counting from the 5′ end, of the antisense strand have reduced off-target gene silencing activity. Accordingly, in some embodiments, the antisense strand comprises at least one (e.g., one, two, three, four, five or more) thermally destabilizing modification of the duplex within the first 9 nucleotide positions of the 5′ region of the antisense strand. In some embodiments, one or more thermally destabilizing modification(s) of the duplex is/are located in positions 2-9, such as positions 4-8, from the 5′-end of the antisense strand. In some further embodiments, the thermally destabilizing modification(s) of the duplex is/are located at position 6, 7 or 8 from the 5′-end of the antisense strand. In still some further embodiments, the thermally destabilizing modification of the duplex is located at position 7 from the 5′-end of the antisense strand. In some embodiments, the thermally destabilizing modification of the duplex is located at position 2, 3, 4, 5 or 9 from the 5′-end of the antisense strand.

[0377] The thermally destabilizing modifications can include, but are not limited to, abasic modification; mismatch with the opposing nucleotide in the opposing strand; and sugar modification such as 2′-deoxy modification, acyclic nucleotide, e.g., unlocked nucleic acids (UNA) or glycol nucleic acid (GNA); and 2′-5′-linked ribonucleotides (“3′-RNA”).

[0378] Exemplified abasic modifications include, but are not limited to the following:

[chemical structure]

### Wherein R=H, Me, Et or OMe; R′=H, Me, Et or OMe; R″=H, Me, Et or OMe

[chemical structure]

wherein B is a modified or unmodified nucleobase.

[0380] Exemplified sugar modifications include, but are not limited to the following:

[chemical structure]

wherein B is a modified or unmodified nucleobase.

[0381] In some embodiments the thermally destabilizing modification of the duplex is selected from the group consisting of:

[chemical structure]

wherein B is a modified or unmodified nucleobase and the asterisk on each structure represents either R, S or racemic.

[0382] In some embodiments the thermally destabilizing modification of the duplex is selected from the group consisting of:

[chemical structure]

wherein B is a modified or unmodified nucleobase and the asterisk represents either R, S or racemic (e.g. S).

[0383] The term “acyclic nucleotide” refers to any nucleotide having an acyclic ribose sugar, for example, where any of bonds between the ribose carbons (e.g., C1′-C2′, C2′-PRNP′, PRNP′-C4′, C4′-O4′, or C1′-O4′) is absent or at least one of ribose carbons or oxygen (e.g., C1′, C2′, PRNP′, C4′, or O4′) are independently or in combination absent from the nucleotide. In some embodiments, acyclic nucleotide is

[chemical structure]

wherein B is a modified or unmodified nucleobase, R¹ and R² independently are H, halogen, OR₃, or alkyl; and R₃ is H, alkyl, cycloalkyl, aryl, aralkyl, heteroaryl or sugar). The term “UNA” refers to unlocked acyclic nucleic acid, wherein any of the bonds of the sugar has been removed, forming an unlocked “sugar” residue. In one example, UNA also encompasses monomers with bonds between C1′-C4′ being removed (i.e. the covalent carbon-oxygen-carbon bond between the C1′ and C4′ carbons). In another example, the C2‘-PRNP’ bond (i.e. the covalent carbon-carbon bond between the C2‘ and PRNP’ carbons) of the sugar is removed (see Mikhailov et. al., Tetrahedron Letters, 26 (17): 2059 (1985); and Fluiter et al., Mol. Biosyst., 10: 1039 (2009), which are hereby incorporated by reference in their entirety). The acyclic derivative provides greater backbone flexibility without affecting the Watson-Crick pairings. The acyclic nucleotide can be linked via 2′-5′ or 3′-5′ linkage.

[0384] The term ‘GNA’ refers to glycol nucleic acid which is a polymer similar to DNA or RNA but differing in the composition of its “backbone” in that is composed of repeating glycerol units linked by phosphodiester bonds:

[chemical structure]

[0385] The thermally destabilizing modification of the duplex can be mismatches (i.e., noncomplementary base pairs) between the thermally destabilizing nucleotide and the opposing nucleotide in the opposite strand within the dsRNA duplex. Exemplary mismatch base pairs include G:G, G:A, G:U, G:T, A:A, A:C, C:C, C:U, C:T, U:U, T:T, U:T, or a combination thereof. Other mismatch base pairings known in the art are also amenable to the present invention. A mismatch can occur between nucleotides that are either naturally occurring nucleotides or modified nucleotides, i.e., the mismatch base pairing can occur between the nucleobases from respective nucleotides independent of the modifications on the ribose sugars of the nucleotides. In certain embodiments, the dsRNA molecule contains at least one nucleobase in the mismatch pairing that is a 2′-deoxy nucleobase; e.g., the 2′-deoxy nucleobase is in the sense strand.

[0386] In some embodiments, the thermally destabilizing modification of the duplex in the seed region of the antisense strand includes nucleotides with impaired Watson-Crick hydrogen-bonding to the complementary base on the target mRNA, such as modified nucleobases:

[chemical structure]

[chemical structure]

[0387] More examples of abasic nucleotide, acyclic nucleotide modifications (including UNA and GNA), and mismatch modifications have been described in detail in WO 2011/133876, which is herein incorporated by reference in its entirety.

The thermally destabilizing modifications may also include universal base with reduced or abolished capability to form hydrogen bonds with the opposing bases, and phosphate modifications.

[0388] In some embodiments, the thermally destabilizing modification of the duplex includes nucleotides with non-canonical bases such as, but not limited to, nucleobase modifications with impaired or completely abolished capability to form hydrogen bonds with bases in the opposite strand. These nucleobase modifications have been evaluated for destabilization of the central region of the dsRNA duplex as described in WO 2010/0011895, which is herein incorporated by reference in its entirety. Exemplary nucleobase modifications are:

[chemical structure]

[0389] In some embodiments, the thermally destabilizing modification of the duplex in the seed region of the antisense strand includes one or more α-nucleotide complementary to the base on the target mRNA, such as:

[chemical structure]

wherein R is H, OH, OCH₃, F, NH₂, NHMe, NMe₂ or O-alkyl.

[0390] Exemplary phosphate modifications known to decrease the thermal stability of dsRNA duplexes compared to natural phosphodiester linkages are:

[chemical structure]

[0391] The alkyl for the R group can be a C_{I}-C₆alkyl. Specific alkyls for the R group include, but are not limited to methyl, ethyl, propyl, isopropyl, butyl, pentyl and hexyl.

[0392] As the skilled artisan will recognize, in view of the functional role of nucleobases is defining specificity of a RNAi agent of the disclosure, while nucleobase modifications can be performed in the various manners as described herein, e.g., to introduce destabilizing modifications into a RNAi agent of the disclosure, e.g., for purpose of enhancing on-target effect relative to off-target effect, the range of modifications available and, in general, present upon RNAi agents of the disclosure tends to be much greater for non-nucleobase modifications, e.g., modifications to sugar groups or phosphate backbones of polyribonucleotides. Such modifications are described in greater detail in other sections of the instant disclosure and are expressly contemplated for RNAi agents of the disclosure, either possessing native nucleobases or modified nucleobases as described above or elsewhere herein.

[0393] In addition to the antisense strand comprising a thermally destabilizing modification, the dsRNA can also comprise one or more stabilizing modifications. For example, the dsRNA can comprise at least two (e.g., two, three, four, five, six, seven, eight, nine, ten or more) stabilizing modifications. Without limitations, the stabilizing modifications all can be present in one strand. In some embodiments, both the sense and the antisense strands comprise at least two stabilizing modifications. The stabilizing modification can occur on any nucleotide of the sense strand or antisense strand. For instance, the stabilizing modification can occur on every nucleotide on the sense strand or antisense strand; each stabilizing modification can occur in an alternating pattern on the sense strand or antisense strand; or the sense strand or antisense strand comprises both stabilizing modification in an alternating pattern. The alternating pattern of the stabilizing modifications on the sense strand may be the same or different from the antisense strand, and the alternating pattern of the stabilizing modifications on the sense strand can have a shift relative to the alternating pattern of the stabilizing modifications on the antisense strand.

[0394] In some embodiments, the antisense strand comprises at least two (e.g., two, three, four, five, six, seven, eight, nine, ten or more) stabilizing modifications. Without limitations, a stabilizing modification in the antisense strand can be present at any positions. In some embodiments, the antisense comprises stabilizing modifications at positions 2, 6, 8, 9, 14, and 16 from the 5′-end. In some other embodiments, the antisense comprises stabilizing modifications at positions 2, 6, 14, and 16 from the 5′-end. In still some other embodiments, the antisense comprises stabilizing modifications at positions 2, 14, and 16 from the 5′-end.

[0395] In some embodiments, the antisense strand comprises at least one stabilizing modification adjacent to the destabilizing modification. For example, the stabilizing modification can be the nucleotide at the 5′-end or the 3′-end of the destabilizing modification, i.e., at position −1 or +1 from the position of the destabilizing modification. In some embodiments, the antisense strand comprises a stabilizing modification at each of the 5′-end and the 3′-end of the destabilizing modification, i.e., positions −1 and +1 from the position of the destabilizing modification.

[0396] In some embodiments, the antisense strand comprises at least two stabilizing modifications at the 3′-end of the destabilizing modification, i.e., at positions +1 and +2 from the position of the destabilizing modification.

[0397] In some embodiments, the sense strand comprises at least two (e.g., two, three, four, five, six, seven, eight, nine, ten or more) stabilizing modifications. Without limitations, a stabilizing modification in the sense strand can be present at any positions. In some embodiments, the sense strand comprises stabilizing modifications at positions 7, 10, and 11 from the 5′-end. In some other embodiments, the sense strand comprises stabilizing modifications at positions 7, 9, 10, and 11 from the 5′-end. In some embodiments, the sense strand comprises stabilizing modifications at positions opposite or complimentary to positions 11, 12, and 15 of the antisense strand, counting from the 5′-end of the antisense strand. In some other embodiments, the sense strand comprises stabilizing modifications at positions opposite or complimentary to positions 11, 12, 13, and 15 of the antisense strand, counting from the 5′-end of the antisense strand. In some embodiments, the sense strand comprises a block of two, three, or four stabilizing modifications.

[0398] In some embodiments, the sense strand does not comprise a stabilizing modification in position opposite or complimentary to the thermally destabilizing modification of the duplex in the antisense strand.

[0399] Exemplary thermally stabilizing modifications include, but are not limited to, 2′-fluoro modifications. Other thermally stabilizing modifications include, but are not limited to, LNA.

[0400] In some embodiments, the dsRNA of the disclosure comprises at least four (e.g., four, five, six, seven, eight, nine, ten, or more) 2′-fluoro nucleotides. Without limitations, the 2′-fluoro nucleotides all can be present in one strand. In some embodiments, both the sense and the antisense strands comprise at least two 2′-fluoro nucleotides. The 2′-fluoro modification can occur on any nucleotide of the sense strand or antisense strand. For instance, the 2′-fluoro modification can occur on every nucleotide on the sense strand or antisense strand; each 2′-fluoro modification can occur in an alternating pattern on the sense strand or antisense strand; or the sense strand or antisense strand comprises both 2′-fluoro modifications in an alternating pattern. The alternating pattern of the 2′-fluoro modifications on the sense strand may be the same or different from the antisense strand, and the alternating pattern of the 2′-fluoro modifications on the sense strand can have a shift relative to the alternating pattern of the 2′-fluoro modifications on the antisense strand.

[0401] In some embodiments, the antisense strand comprises at least two (e.g., two, three, four, five, six, seven, eight, nine, ten, or more) 2′-fluoro nucleotides. Without limitations, a 2′-fluoro modification in the antisense strand can be present at any positions. In some embodiments, the antisense comprises 2′-fluoro nucleotides at positions 2, 6, 8, 9, 14, and 16 from the 5′-end. In some other embodiments, the antisense comprises 2′-fluoro nucleotides at positions 2, 6, 14, and 16 from the 5′-end. In still some other embodiments, the antisense comprises 2′-fluoro nucleotides at positions 2, 14, and 16 from the 5′-end.

[0402] In some embodiments, the antisense strand comprises at least one 2′-fluoro nucleotide adjacent to the destabilizing modification. For example, the 2′-fluoro nucleotide can be the nucleotide at the 5′-end or the 3′-end of the destabilizing modification, i.e., at position −1 or +1 from the position of the destabilizing modification. In some embodiments, the antisense strand comprises a 2′-fluoro nucleotide at each of the 5′-end and the 3′-end of the destabilizing modification, i.e., positions −1 and +1 from the position of the destabilizing modification.

[0403] In some embodiments, the antisense strand comprises at least two 2′-fluoro nucleotides at the 3′-end of the destabilizing modification, i.e., at positions +1 and +2 from the position of the destabilizing modification.

[0404] In some embodiments, the sense strand comprises at least two (e.g., two, three, four, five, six, seven, eight, nine, ten, or more) 2′-fluoro nucleotides. Without limitations, a 2′-fluoro modification in the sense strand can be present at any positions. In some embodiments, the antisense comprises 2′-fluoro nucleotides at positions 7, 10, and 11 from the 5′-end. In some other embodiments, the sense strand comprises 2′-fluoro nucleotides at positions 7, 9, 10, and 11 from the 5′-end. In some embodiments, the sense strand comprises 2′-fluoro nucleotides at positions opposite or complimentary to positions 11, 12, and 15 of the antisense strand, counting from the 5′-end of the antisense strand. In some other embodiments, the sense strand comprises 2′-fluoro nucleotides at positions opposite or complimentary to positions 11, 12, 13, and 15 of the antisense strand, counting from the 5′-end of the antisense strand. In some embodiments, the sense strand comprises a block of two, three or four 2′-fluoro nucleotides.

[0405] In some embodiments, the sense strand does not comprise a 2′-fluoro nucleotide in position opposite or complimentary to the thermally destabilizing modification of the duplex in the antisense strand.

[0406] In some embodiments, the dsRNA molecule of the disclosure comprises a 21 nucleotides (nt) sense strand and a 23 nucleotides (nt) antisense, wherein the antisense strand contains at least one thermally destabilizing nucleotide, where the at least one thermally destabilizing nucleotide occurs in the seed region of the antisense strand (i.e., at position 2-9 of the 5′-end of the antisense strand), wherein one end of the dsRNA is blunt, while the other end is comprises a 2 nt overhang, and wherein the dsRNA optionally further has at least one (e.g., one, two, three, four, five, six or all seven) of the following characteristics: (i) the antisense comprises 2, 3, 4, 5, or 6 2′-fluoro modifications; (ii) the antisense comprises 1, 2, 3, 4, or 5 phosphorothioate internucleotide linkages; (iii) the sense strand is conjugated with a ligand; (iv) the sense strand comprises 2, 3, 4, or 5 2′-fluoro modifications; (v) the sense strand comprises 1, 2, 3, 4, or 5 phosphorothioate internucleotide linkages; (vi) the dsRNA comprises at least four 2′-fluoro modifications; and (vii) the dsRNA comprises a blunt end at 5′-end of the antisense strand. In another embodiment, the two nucleotide overhang is at the 3′-end of the antisense.

[0407] In some embodiments, the dsRNA molecule of the disclosure comprising a sense and antisense strands, wherein: the sense strand is 25-30 nucleotide residues in length, wherein starting from the 5′ terminal nucleotide (position 1), positions 1 to 23 of said sense strand comprise at least 8 ribonucleotides; antisense strand is 36-66 nucleotide residues in length and, starting from the 3′ terminal nucleotide, at least 8 ribonucleotides in the positions paired with positions 1-23 of sense strand to form a duplex; wherein at least the 3′terminal nucleotide of antisense strand is unpaired with sense strand, and up to 6 consecutive 3′ terminal nucleotides are unpaired with sense strand, thereby forming a 3′ single stranded overhang of 1-6 nucleotides; wherein the 5′ terminus of antisense strand comprises from 10-30 consecutive nucleotides which are unpaired with sense strand, thereby forming a 10-30 nucleotide single stranded 5′ overhang; wherein at least the sense strand 5′ terminal and 3′ terminal nucleotides are base paired with nucleotides of antisense strand when sense and antisense strands are aligned for maximum complementarity, thereby forming a substantially duplexed region between sense and antisense strands; and antisense strand is sufficiently complementary to a target RNA along at least 19 ribonucleotides of antisense strand length to reduce target gene expression when said double stranded nucleic acid is introduced into a mammalian cell; and wherein the antisense strand contains at least one thermally destabilizing nucleotide, where at least one thermally destabilizing nucleotide is in the seed region of the antisense strand (i.e. at position 2-9 of the 5′-end of the antisense strand). For example, the thermally destabilizing nucleotide occurs between positions opposite or complimentary to positions 14-17 of the 5′-end of the sense strand, and wherein the dsRNA optionally further has at least one (e.g., one, two, three, four, five, six or all seven) of the following characteristics: (i) the antisense comprises 2, 3, 4, 5, or 6 2′-fluoro modifications; (ii) the antisense comprises 1, 2, 3, 4, or 5 phosphorothioate internucleotide linkages; (iii) the sense strand is conjugated with a ligand; (iv) the sense strand comprises 2, 3, 4, or 5 2′-fluoro modifications; (v) the sense strand comprises 1, 2, 3, 4, or 5 phosphorothioate internucleotide linkages; and (vi) the dsRNA comprises at least four 2′-fluoro modifications; and (vii) the dsRNA comprises a duplex region of 12-30 nucleotide pairs in length.

[0408] In some embodiments, the dsRNA molecule of the disclosure comprises a sense and antisense strands, wherein said dsRNA molecule comprises a sense strand having a length which is at least 25 and at most 29 nucleotides and an antisense strand having a length which is at most 30 nucleotides with the sense strand comprises a modified nucleotide that is susceptible to enzymatic degradation at position 11 from the 5′end, wherein the 3′ end of said sense strand and the 5′ end of said antisense strand form a blunt end and said antisense strand is 1-4 nucleotides longer at its 3′ end than the sense strand, wherein the duplex region which is at least 25 nucleotides in length, and said antisense strand is sufficiently complementary to a target mRNA along at least 19 nucleotides of said antisense strand length to reduce target gene expression when said dsRNA molecule is introduced into a mammalian cell, and wherein dicer cleavage of said dsRNA results in an siRNA comprising said 3′ end of said antisense strand, thereby reducing expression of the target gene in the mammal, wherein the antisense strand contains at least one thermally destabilizing nucleotide, where the at least one thermally destabilizing nucleotide is in the seed region of the antisense strand (i.e. at position 2-9 of the 5′-end of the antisense strand), and wherein the dsRNA optionally further has at least one (e.g., one, two, three, four, five, six or all seven) of the following characteristics: (i) the antisense comprises 2, 3, 4, 5, or 6 2′-fluoro modifications; (ii) the antisense comprises 1, 2, 3, 4, or 5 phosphorothioate internucleotide linkages; (iii) the sense strand is conjugated with a ligand; (iv) the sense strand comprises 2, 3, 4, or 5 2′-fluoro modifications; (v) the sense strand comprises 1, 2, 3, 4, or 5 phosphorothioate internucleotide linkages; and (vi) the dsRNA comprises at least four 2′-fluoro modifications; and (vii) the dsRNA has a duplex region of 12-29 nucleotide pairs in length.

[0409] In some embodiments, every nucleotide in the sense strand and antisense strand of the dsRNA molecule may be modified. Each nucleotide may be modified with the same or different modification which can include one or more alteration of one or both of the non-linking phosphate oxygens or of one or more of the linking phosphate oxygens; alteration of a constituent of the ribose sugar, e.g., of the 2′ hydroxyl on the ribose sugar; wholesale replacement of the phosphate moiety with “dephospho” linkers; modification or replacement of a naturally occurring base; and replacement or modification of the ribose-phosphate backbone.

[0410] As nucleic acids are polymers of subunits, many of the modifications occur at a position which is repeated within a nucleic acid, e.g., a modification of a base, or a phosphate moiety, or a non-linking O of a phosphate moiety. In some cases, the modification will occur at all of the subject positions in the nucleic acid but in many cases it will not. By way of example, a modification may only occur at a 3′ or 5′ terminal position, may only occur in a terminal region, e.g., at a position on a terminal nucleotide or in the last 2, 3, 4, 5, or 10 nucleotides of a strand. A modification may occur in a double strand region, a single strand region, or in both. A modification may occur only in the double strand region of an RNA or may only occur in a single strand region of an RNA. E.g., a phosphorothioate modification at a non-linking O position may only occur at one or both termini, may only occur in a terminal region, e.g., at a position on a terminal nucleotide or in the last 2, 3, 4, 5, or 10 nucleotides of a strand, or may occur in double strand and single strand regions, particularly at termini. The 5′ end or ends can be phosphorylated.

[0411] It may be possible, e.g., to enhance stability, to include particular bases in overhangs, or to include modified nucleotides or nucleotide surrogates, in single strand overhangs, e.g., in a 5′ or 3′ overhang, or in both. E.g., it can be desirable to include purine nucleotides in overhangs. In some embodiments all or some of the bases in a 3′ or 5′ overhang may be modified, e.g., with a modification described herein. Modifications can include, e.g., the use of modifications at the 2′ position of the ribose sugar with modifications that are known in the art, e.g., the use of deoxyribonucleotides, 2′-deoxy-2′-fluoro (2′-F) or 2′-O-methyl modified instead of the ribosugar of the nucleobase, and modifications in the phosphate group, e.g., phosphorothioate modifications. Overhangs need not be homologous with the target sequence.

[0412] In some embodiments, each residue of the sense strand and antisense strand is independently modified with LNA, HNA, CeNA, 2′-methoxyethyl, 2′-O-methyl, 2′-O-allyl, 2′-C-allyl, 2′-deoxy, or 2′-fluoro. The strands can contain more than one modification. In some embodiments, each residue of the sense strand and antisense strand is independently modified with 2′-O-methyl or 2′-fluoro. It is to be understood that these modifications are in addition to the at least one thermally destabilizing modification of the duplex present in the antisense strand.

[0413] At least two different modifications are typically present on the sense strand and antisense strand. Those two modifications may be the 2′-deoxy, 2′-O-methyl or 2′-fluoro modifications, acyclic nucleotides or others. In some embodiments, the sense strand and antisense strand each comprises two differently modified nucleotides selected from 2′-O-methyl or 2′-deoxy. In some embodiments, each residue of the sense strand and antisense strand is independently modified with 2′-O-methyl nucleotide, 2′-deoxy nucleotide, 2′-deoxy-2′-fluoro nucleotide, 2′-O—N-methylacetamido (2′-O-NMA, 2′O—CH₂C(O)N(Me)H) nucleotide, a 2′-O-dimethylaminoethoxyethyl (2′-O-DMAEOE) nucleotide, 2′-O-aminopropyl (2′-O-AP) nucleotide, or 2′-ara-F nucleotide. Again, it is to be understood that these modifications are in addition to the at least one thermally destabilizing modification of the duplex present in the antisense strand.

[0414] In some embodiments, the dsRNA molecule of the disclosure comprises modifications of an alternating pattern. The term “alternating motif” or “alternative pattern” as used herein refers to a motif having one or more modifications, each modification occurring on alternating nucleotides of one strand. The alternating nucleotide may refer to one per every other nucleotide or one per every three nucleotides, or a similar pattern. For example, if A, B and C each represent one type of modification to the nucleotide, the alternating motif can be “ABABABABABAB . . . ,” “AABBAABBAABB . . . ,” “AABAABAABAAB . . . ,” “AAABAAABAAAB . . . ,” “AAABBBAAABBB . . . ,” or “ABCABCABCABC . . . ,” etc.

The type of modifications contained in the alternating motif may be the same or different. For example, if A, B, C, D each represent one type of modification on the nucleotide, the alternating pattern, i.e., modifications on every other nucleotide, may be the same, but each of the sense strand or antisense strand can be selected from several possibilities of modifications within the alternating motif such as “ABABAB . . . ”, “ACACAC . . . ” “BDBDBD . . . ” or “CDCDCD . . . ,” etc.

[0415] In some embodiments, the dsRNA molecule of the disclosure comprises the modification pattern for the alternating motif on the sense strand relative to the modification pattern for the alternating motif on the antisense strand is shifted. The shift may be such that the modified group of nucleotides of the sense strand corresponds to a differently modified group of nucleotides of the antisense strand and vice versa. For example, the sense strand when paired with the antisense strand in the dsRNA duplex, the alternating motif in the sense strand may start with “ABABAB” from 5′-3′ of the strand and the alternating motif in the antisense strand may start with “BABABA” from 3′-5′ of the strand within the duplex region. As another example, the alternating motif in the sense strand may start with “AABBAABB” from 5′-3′ of the strand and the alternating motif in the antisense strand may start with “BBAABBAA” from 3′-5′ of the strand within the duplex region, so that there is a complete or partial shift of the modification patterns between the sense strand and the antisense strand.

[0416] In one particular example, the alternating motif in the sense strand is “ABABAB” sfrom 5′-3′ of the strand, where each A is an unmodified ribonucleotide and each B is a 2′-Omethyl modified nucleotide.

[0417] In one particular example, the alternating motif in the sense strand is “ABABAB” sfrom 5′-3′ of the strand, where each A is an 2′-deoxy-2′-fluoro modified nucleotide and each B is a 2′-Omethyl modified nucleotide.

[0418] In another particular example, the alternating motif in the antisense strand is “BABABA” from 3′-5′ of the strand, where each A is a 2′-deoxy-2′-fluoro modified nucleotide and each B is a 2′-Omethyl modified nucleotide.

[0419] In one particular example, the alternating motif in the sense strand is “ABABAB” sfrom 5′-3′ of the strand and the alternating motif in the antisense strand is “BABABA” from 3′-5′ of the strand, where each A is an unmodified ribonucleotide and each B is a 2′-Omethyl modified nucleotide.

[0420] In one particular example, the alternating motif in the sense strand is “ABABAB” sfrom 5′-3′ of the strand and the alternating motif in the antisense strand is “BABABA” from 3′-5′ of the strand, where each A is a 2′-deoxy-2′-fluoro modified nucleotide and each B is a 2′-Omethyl modified nucleotide.

[0421] The dsRNA molecule of the disclosure may further comprise at least one phosphorothioate or methylphosphonate internucleotide linkage. The phosphorothioate or methylphosphonate internucleotide linkage modification may occur on any nucleotide of the sense strand or antisense strand or both in any position of the strand. For instance, the internucleotide linkage modification may occur on every nucleotide on the sense strand or antisense strand; each internucleotide linkage modification may occur in an alternating pattern on the sense strand or antisense strand; or the sense strand or antisense strand comprises both internucleotide linkage modifications in an alternating pattern. The alternating pattern of the internucleotide linkage modification on the sense strand may be the same or different from the antisense strand, and the alternating pattern of the internucleotide linkage modification on the sense strand may have a shift relative to the alternating pattern of the internucleotide linkage modification on the antisense strand.

[0422] In some embodiments, the dsRNA molecule comprises the phosphorothioate or methylphosphonate internucleotide linkage modification in the overhang region. For example, the overhang region comprises two nucleotides having a phosphorothioate or methylphosphonate internucleotide linkage between the two nucleotides. Internucleotide linkage modifications also may be made to link the overhang nucleotides with the terminal paired nucleotides within duplex region. For example, at least 2, 3, 4, or all the overhang nucleotides may be linked through phosphorothioate or methylphosphonate internucleotide linkage, and optionally, there may be additional phosphorothioate or methylphosphonate internucleotide linkages linking the overhang nucleotide with a paired nucleotide that is next to the overhang nucleotide. For instance, there may be at least two phosphorothioate internucleotide linkages between the terminal three nucleotides, in which two of the three nucleotides are overhang nucleotides, and the third is a paired nucleotide next to the overhang nucleotide. In one emobodiment, these terminal three nucleotides may be at the 3′-end of the antisense strand.

[0423] In some embodiments, the sense strand of the dsRNA molecule comprises 1-10 blocks of two to ten phosphorothioate or methylphosphonate internucleotide linkages separated by 1, 2, 3, 4, 5, 6, 7, 8, 9, 10, 11, 12, 13, 14, 15, or 16 phosphate internucleotide linkages, wherein one of the phosphorothioate or methylphosphonate internucleotide linkages is placed at any position in the oligonucleotide sequence and the said sense strand is paired with an antisense strand comprising any combination of phosphorothioate, methylphosphonate and phosphate internucleotide linkages or an antisense strand comprising either phosphorothioate or methylphosphonate or phosphate linkage.

[0424] In some embodiments, the antisense strand of the dsRNA molecule comprises two blocks of two phosphorothioate or methylphosphonate internucleotide linkages separated by 1, 2, 3, 4, 5, 6, 7, 8, 9, 10, 11, 12, 13, 14, 15, 16, 17, or 18 phosphate internucleotide linkages, wherein one of the phosphorothioate or methylphosphonate internucleotide linkages is placed at any position in the oligonucleotide sequence and the said antisense strand is paired with a sense strand comprising any combination of phosphorothioate, methylphosphonate and phosphate internucleotide linkages or an antisense strand comprising either phosphorothioate or methylphosphonate or phosphate linkage.

[0425] In some embodiments, the antisense strand of the dsRNA molecule comprises two blocks of three phosphorothioate or methylphosphonate internucleotide linkages separated by 1, 2, 3, 4, 5, 6, 7, 8, 9, 10, 11, 12, 13, 14, 15, or 16 phosphate internucleotide linkages, wherein one of the phosphorothioate or methylphosphonate internucleotide linkages is placed at any position in the oligonucleotide sequence and the said antisense strand is paired with a sense strand comprising any combination of phosphorothioate, methylphosphonate and phosphate internucleotide linkages or an antisense strand comprising either phosphorothioate or methylphosphonate or phosphate linkage.

[0426] In some embodiments, the antisense strand of the dsRNA molecule comprises two blocks of four phosphorothioate or methylphosphonate internucleotide linkages separated by 1, 2, 3, 4, 5, 6, 7, 8, 9, 10, 11, 12, 13, or 14 phosphate internucleotide linkages, wherein one of the phosphorothioate or methylphosphonate internucleotide linkages is placed at any position in the oligonucleotide sequence and the said antisense strand is paired with a sense strand comprising any combination of phosphorothioate, methylphosphonate and phosphate internucleotide linkages or an antisense strand comprising either phosphorothioate or methylphosphonate or phosphate linkage.

[0427] In some embodiments, the antisense strand of the dsRNA molecule comprises two blocks of five phosphorothioate or methylphosphonate internucleotide linkages separated by 1, 2, 3, 4, 5, 6, 7, 8, 9, 10, 11, or 12 phosphate internucleotide linkages, wherein one of the phosphorothioate or methylphosphonate internucleotide linkages is placed at any position in the oligonucleotide sequence and the said antisense strand is paired with a sense strand comprising any combination of phosphorothioate, methylphosphonate and phosphate internucleotide linkages or an antisense strand comprising either phosphorothioate or methylphosphonate or phosphate linkage.

[0428] In some embodiments, the antisense strand of the dsRNA molecule comprises two blocks of six phosphorothioate or methylphosphonate internucleotide linkages separated by 1, 2, 3, 4, 5, 6, 7, 8, 9, or 10 phosphate internucleotide linkages, wherein one of the phosphorothioate or methylphosphonate internucleotide linkages is placed at any position in the oligonucleotide sequence and the said antisense strand is paired with a sense strand comprising any combination of phosphorothioate, methylphosphonate and phosphate internucleotide linkages or an antisense strand comprising either phosphorothioate or methylphosphonate or phosphate linkage.

[0429] In some embodiments, the antisense strand of the dsRNA molecule comprises two blocks of seven phosphorothioate or methylphosphonate internucleotide linkages separated by 1, 2, 3, 4, 5, 6, 7, or 8 phosphate internucleotide linkages, wherein one of the phosphorothioate or methylphosphonate internucleotide linkages is placed at any position in the oligonucleotide sequence and the said antisense strand is paired with a sense strand comprising any combination of phosphorothioate, methylphosphonate and phosphate internucleotide linkages or an antisense strand comprising either phosphorothioate or methylphosphonate or phosphate linkage.

[0430] In some embodiments, the antisense strand of the dsRNA molecule comprises two blocks of eight phosphorothioate or methylphosphonate internucleotide linkages separated by 1, 2, 3, 4, 5, or 6 phosphate internucleotide linkages, wherein one of the phosphorothioate or methylphosphonate internucleotide linkages is placed at any position in the oligonucleotide sequence and the said antisense strand is paired with a sense strand comprising any combination of phosphorothioate, methylphosphonate and phosphate internucleotide linkages or an antisense strand comprising either phosphorothioate or methylphosphonate or phosphate linkage.

[0431] In some embodiments, the antisense strand of the dsRNA molecule comprises two blocks of nine phosphorothioate or methylphosphonate internucleotide linkages separated by 1, 2, 3, or 4 phosphate internucleotide linkages, wherein one of the phosphorothioate or methylphosphonate internucleotide linkages is placed at any position in the oligonucleotide sequence and the said antisense strand is paired with a sense strand comprising any combination of phosphorothioate, methylphosphonate and phosphate internucleotide linkages or an antisense strand comprising either phosphorothioate or methylphosphonate or phosphate linkage.

[0432] In some embodiments, the dsRNA molecule of the disclosure further comprises one or more phosphorothioate or methylphosphonate internucleotide linkage modification within 1-10 nucleotides of the termini position(s) of the sense or antisense strand. For example, at least 2, 3, 4, 5, 6, 7, 8, 9, or 10 nucleotides may be linked through phosphorothioate or methylphosphonate internucleotide linkage at one end or both ends of the sense or antisense strand.

[0433] In some embodiments, the dsRNA molecule of the disclosure further comprises one or more phosphorothioate or methylphosphonate internucleotide linkage modification within 1-10 nucleotides of the internal region of the duplex of each of the sense or antisense strand. For example, at least 2, 3, 4, 5, 6, 7, 8, 9, or 10 nucleotides may be linked through phosphorothioate or methylphosphonate internucleotide linkage at position 8-16 of the duplex region counting from the 5′-end of the sense strand; the dsRNA molecule can optionally further comprise one or more phosphorothioate or methylphosphonate internucleotide linkage modification within 1-10 of the termini position(s).

[0434] In some embodiments, the dsRNA molecule of the disclosure further comprises one to five phosphorothioate or methylphosphonate internucleotide linkage modification(s) within position 1-5 and one to five phosphorothioate or methylphosphonate internucleotide linkage modification(s) within position 18-23 of the sense strand (counting from the 5′-end), and one to two phosphorothioate or methylphosphonate internucleotide linkage modification at positions 1 and 2 and one to five within positions 18-23 of the antisense strand (counting from the 5′-end).

[0435] In some embodiments, the dsRNA molecule of the disclosure further comprises one phosphorothioate internucleotide linkage modification within position 1-5 and one phosphorothioate or methylphosphonate internucleotide linkage modification within position 18-23 of the sense strand (counting from the 5′-end), and one phosphorothioate internucleotide linkage modification at positions 1 or 2 and two phosphorothioate or methylphosphonate internucleotide linkage modifications within positions 18-23 of the antisense strand (counting from the 5′-end).

[0436] In some embodiments, the dsRNA molecule of the disclosure further comprises two phosphorothioate internucleotide linkage modifications within position 1-5 and one phosphorothioate internucleotide linkage modification within position 18-23 of the sense strand (counting from the 5′-end), and one phosphorothioate internucleotide linkage modification at positions 1 and 2 and two phosphorothioate internucleotide linkage modifications within positions 18-23 of the antisense strand (counting from the 5′-end).

[0437] In some embodiments, the dsRNA molecule of the disclosure further comprises two phosphorothioate internucleotide linkage modifications within position 1-5 and two phosphorothioate internucleotide linkage modifications within position 18-23 of the sense strand (counting from the 5′-end), and one phosphorothioate internucleotide linkage modification at positions 1 and 2 and two phosphorothioate internucleotide linkage modifications within positions 18-23 of the antisense strand (counting from the 5′-end).

[0438] In some embodiments, the dsRNA molecule of the disclosure further comprises two phosphorothioate internucleotide linkage modifications within position 1-5 and two phosphorothioate internucleotide linkage modifications within position 18-23 of the sense strand (counting from the 5′-end), and one phosphorothioate internucleotide linkage modification at positions 1 and 2 and one phosphorothioate internucleotide linkage modification within positions 18-23 of the antisense strand (counting from the 5′-end).

[0439] In some embodiments, the dsRNA molecule of the disclosure further comprises one phosphorothioate internucleotide linkage modification within position 1-5 and one phosphorothioate internucleotide linkage modification within position 18-23 of the sense strand (counting from the 5′-end), and two phosphorothioate internucleotide linkage modifications at positions 1 and 2 and two phosphorothioate internucleotide linkage modifications within positions 18-23 of the antisense strand (counting from the 5′-end).

[0440] In some embodiments, the dsRNA molecule of the disclosure further comprises one phosphorothioate internucleotide linkage modification within position 1-5 and one within position 18-23 of the sense strand (counting from the 5′-end), and two phosphorothioate internucleotide linkage modification at positions 1 and 2 and one phosphorothioate internucleotide linkage modification within positions 18-23 of the antisense strand (counting from the 5′-end).

[0441] In some embodiments, the dsRNA molecule of the disclosure further comprises one phosphorothioate internucleotide linkage modification within position 1-5 (counting from the 5′-end) of the sense strand, and two phosphorothioate internucleotide linkage modifications at positions 1 and 2 and one phosphorothioate internucleotide linkage modification within positions 18-23 of the antisense strand (counting from the 5′-end).

[0442] In some embodiments, the dsRNA molecule of the disclosure further comprises two phosphorothioate internucleotide linkage modifications within position 1-5 (counting from the 5′-end) of the sense strand, and one phosphorothioate internucleotide linkage modification at positions 1 and 2 and two phosphorothioate internucleotide linkage modifications within positions 18-23 of the antisense strand (counting from the 5′-end).

[0443] In some embodiments, the dsRNA molecule of the disclosure further comprises two phosphorothioate internucleotide linkage modifications within position 1-5 and one within position 18-23 of the sense strand (counting from the 5′-end), and two phosphorothioate internucleotide linkage modifications at positions 1 and 2 and one phosphorothioate internucleotide linkage modification within positions 18-23 of the antisense strand (counting from the 5′-end).

[0444] In some embodiments, the dsRNA molecule of the disclosure further comprises two phosphorothioate internucleotide linkage modifications within position 1-5 and one phosphorothioate internucleotide linkage modification within position 18-23 of the sense strand (counting from the 5′-end), and two phosphorothioate internucleotide linkage modifications at positions 1 and 2 and two phosphorothioate internucleotide linkage modifications within positions 18-23 of the antisense strand (counting from the 5′-end).

[0445] In some embodiments, the dsRNA molecule of the disclosure further comprises two phosphorothioate internucleotide linkage modifications within position 1-5 and one phosphorothioate internucleotide linkage modification within position 18-23 of the sense strand (counting from the 5′-end), and one phosphorothioate internucleotide linkage modification at positions 1 and 2 and two phosphorothioate internucleotide linkage modifications within positions 18-23 of the antisense strand (counting from the 5′-end).

[0446] In some embodiments, the dsRNA molecule of the disclosure further comprises two phosphorothioate internucleotide linkage modifications at position 1 and 2, and two phosphorothioate internucleotide linkage modifications at position 20 and 21 of the sense strand (counting from the 5′-end), and one phosphorothioate internucleotide linkage modification at positions 1 and one at position 21 of the antisense strand (counting from the 5′-end).

[0447] In some embodiments, the dsRNA molecule of the disclosure further comprises one phosphorothioate internucleotide linkage modification at position 1, and one phosphorothioate internucleotide linkage modification at position 21 of the sense strand (counting from the 5′-end), and two phosphorothioate internucleotide linkage modifications at positions 1 and 2 and two phosphorothioate internucleotide linkage modifications at positions 20 and 21 the antisense strand (counting from the 5′-end).

[0448] In some embodiments, the dsRNA molecule of the disclosure further comprises two phosphorothioate internucleotide linkage modifications at position 1 and 2, and two phosphorothioate internucleotide linkage modifications at position 21 and 22 of the sense strand (counting from the 5′-end), and one phosphorothioate internucleotide linkage modification at positions 1 and one phosphorothioate internucleotide linkage modification at position 21 of the antisense strand (counting from the 5′-end).

[0449] In some embodiments, the dsRNA molecule of the disclosure further comprises one phosphorothioate internucleotide linkage modification at position 1, and one phosphorothioate internucleotide linkage modification at position 21 of the sense strand (counting from the 5′-end), and two phosphorothioate internucleotide linkage modifications at positions 1 and 2 and two phosphorothioate internucleotide linkage modifications at positions 21 and 22 the antisense strand (counting from the 5′-end).

[0450] In some embodiments, the dsRNA molecule of the disclosure further comprises two phosphorothioate internucleotide linkage modifications at position 1 and 2, and two phosphorothioate internucleotide linkage modifications at position 22 and 23 of the sense strand (counting from the 5′-end), and one phosphorothioate internucleotide linkage modification at positions 1 and one phosphorothioate internucleotide linkage modification at position 21 of the antisense strand (counting from the 5′-end).

[0451] In some embodiments, the dsRNA molecule of the disclosure further comprises one phosphorothioate internucleotide linkage modification at position 1, and one phosphorothioate internucleotide linkage modification at position 21 of the sense strand (counting from the 5′-end), and two phosphorothioate internucleotide linkage modifications at positions 1 and 2 and two phosphorothioate internucleotide linkage modifications at positions 23 and 23 the antisense strand (counting from the 5′-end).

[0452] In some embodiments, compound of the disclosure comprises a pattern of backbone chiral centers. In some embodiments, a common pattern of backbone chiral centers comprises at least 5 internucleotidic linkages in the Sp configuration. In some embodiments, a common pattern of backbone chiral centers comprises at least 6 internucleotidic linkages in the Sp configuration. In some embodiments, a common pattern of backbone chiral centers comprises at least 7 internucleotide linkages in the Sp configuration. In some embodiments, a common pattern of backbone chiral centers comprises at least 8 internucleotide linkages in the Sp configuration. In some embodiments, a common pattern of backbone chiral centers comprises at least 9 internucleotide linkages in the Sp configuration. In some embodiments, a common pattern of backbone chiral centers comprises at least 10 internucleotide linkages in the Sp configuration. In some embodiments, a common pattern of backbone chiral centers comprises at least 11 internucleotide linkages in the Sp configuration. In some embodiments, a common pattern of backbone chiral centers comprises at least 12 internucleotide linkages in the Sp configuration. In some embodiments, a common pattern of backbone chiral centers comprises at least 13 internucleotide linkages in the Sp configuration. In some embodiments, a common pattern of backbone chiral centers comprises at least 14 internucleotide linkages in the Sp configuration. In some embodiments, a common pattern of backbone chiral centers comprises at least 15 internucleotide linkages in the Sp configuration. In some embodiments, a common pattern of backbone chiral centers comprises at least 16 internucleotide linkages in the Sp configuration. In some embodiments, a common pattern of backbone chiral centers comprises at least 17 internucleotide linkages in the Sp configuration. In some embodiments, a common pattern of backbone chiral centers comprises at least 18 internucleotide linkages in the Sp configuration. In some embodiments, a common pattern of backbone chiral centers comprises at least 19 internucleotide linkages in the Sp configuration. In some embodiments, a common pattern of backbone chiral centers comprises no more than 8 internucleotide linkages in the Rp configuration. In some embodiments, a common pattern of backbone chiral centers comprises no more than 7 internucleotide linkages in the Rp configuration. In some embodiments, a common pattern of backbone chiral centers comprises no more than 6 internucleotide linkages in the Rp configuration. In some embodiments, a common pattern of backbone chiral centers comprises no more than 5 internucleotide linkages in the Rp configuration. In some embodiments, a common pattern of backbone chiral centers comprises no more than 4 internucleotide linkages in the Rp configuration. In some embodiments, a common pattern of backbone chiral centers comprises no more than 3 internucleotide linkages in the Rp configuration. In some embodiments, a common pattern of backbone chiral centers comprises no more than 2 internucleotide linkages in the Rp configuration. In some embodiments, a common pattern of backbone chiral centers comprises no more than 1 internucleotide linkages in the Rp configuration. In some embodiments, a common pattern of backbone chiral centers comprises no more than 8 internucleotide linkages which are not chiral (as a non-limiting example, a phosphodiester). In some embodiments, a common pattern of backbone chiral centers comprises no more than 7 internucleotide linkages which are not chiral. In some embodiments, a common pattern of backbone chiral centers comprises no more than 6 internucleotide linkages which are not chiral. In some embodiments, a common pattern of backbone chiral centers comprises no more than 5 internucleotide linkages which are not chiral. In some embodiments, a common pattern of backbone chiral centers comprises no more than 4 internucleotide linkages which are not chiral. In some embodiments, a common pattern of backbone chiral centers comprises no more than 3 internucleotide linkages which are not chiral. In some embodiments, a common pattern of backbone chiral centers comprises no more than 2 internucleotide linkages which are not chiral. In some embodiments, a common pattern of backbone chiral centers comprises no more than 1 internucleotide linkage which is not chiral. In some embodiments, a common pattern of backbone chiral centers comprises at least 10 internucleotide linkages in the Sp configuration, and no more than 8 internucleotide linkages which are not chiral. In some embodiments, a common pattern of backbone chiral centers comprises at least 11 internucleotide linkages in the Sp configuration, and no more than 7 internucleotide linkages which are not chiral. In some embodiments, a common pattern of backbone chiral centers comprises at least 12 internucleotide linkages in the Sp configuration, and no more than 6 internucleotide linkages which are not chiral. In some embodiments, a common pattern of backbone chiral centers comprises at least 13 internucleotide linkages in the Sp configuration, and no more than 6 internucleotide linkages which are not chiral. In some embodiments, a common pattern of backbone chiral centers comprises at least 14 internucleotide linkages in the Sp configuration, and no more than 5 internucleotide linkages which are not chiral. In some embodiments, a common pattern of backbone chiral centers comprises at least 15 internucleotide linkages in the Sp configuration, and no more than 4 internucleotide linkages which are not chiral. In some embodiments, the internucleotide linkages in the Sp configuration are optionally contiguous or not contiguous. In some embodiments, the internucleotide linkages in the Rp configuration are optionally contiguous or not contiguous. In some embodiments, the internucleotide linkages which are not chiral are optionally contiguous or not contiguous.

[0453] In some embodiments, compound of the disclosure comprises a block is a stereochemistry block. In some embodiments, a block is an Rp block in that each internucleotidic linkage of the block is Rp. In some embodiments, a 5′-block is an Rp block. In some embodiments, a 3′-block is an Rp block. In some embodiments, a block is an Sp block in that each internucleotidic linkage of the block is Sp. In some embodiments, a 5′-block is an Sp block. In some embodiments, a 3′-block is an Sp block. In some embodiments, provided oligonucleotides comprise both Rp and Sp blocks. In some embodiments, provided oligonucleotides comprise one or more Rp but no Sp blocks. In some embodiments, provided oligonucleotides comprise one or more Sp but no Rp blocks. In some embodiments, provided oligonucleotides comprise one or more natural phosphate linkage (PO) blocks wherein each internucleotide linkage in a natural phosphate linkage.

[0454] In some embodiments, compound of the disclosure comprises a 5′-block is an Sp block wherein each sugar moiety comprises a 2′-F modification. In some embodiments, a 5′-block is an Sp block wherein each of internucleotide linkages is a modified internucleotide linkage and each sugar moiety comprises a 2′-F modification. In some embodiments, a 5′-block is an Sp block wherein each of internucleotide linkage is a phosphorothioate linkage and each sugar moiety comprises a 2′-F modification. In some embodiments, a 5′-block comprises 4 or more nucleoside units. In some embodiments, a 5′-block comprises 5 or more nucleoside units. In some embodiments, a 5′-block comprises 6 or more nucleoside units. In some embodiments, a 5′-block comprises 7 or more nucleoside units. In some embodiments, a 3′-block is an Sp block wherein each sugar moiety comprises a 2′-F modification. In some embodiments, a 3′-block is an Sp block wherein each of internucleotide linkage is a modified internucleotide linkage and each sugar moiety comprises a 2′-F modification. In some embodiments, a 3′-block is an Sp block wherein each of internucleotide linkage is a phosphorothioate linkage and each sugar moiety comprises a 2′-F modification. In some embodiments, a 3′-block comprises 4 or more nucleoside units. In some embodiments, a 3′-block comprises 5 or more nucleoside units. In some embodiments, a 3′-block comprises 6 or more nucleoside units. In some embodiments, a 3′-block comprises 7 or more nucleoside units.

[0455] In some embodiments, compound of the disclosure comprises a type of nucleoside in a region or an oligonucleotide is followed by a specific type of internucleotide linkage, e.g., natural phosphate linkage, modified internucleotide linkage, Rp chiral internucleotide linkage, Sp chiral internucleotide linkage, etc. In some embodiments, A is followed by Sp. In some embodiments, A is followed by Rp. In some embodiments, A is followed by natural phosphate linkage (PO). In some embodiments, U is followed by Sp. In some embodiments, U is followed by Rp. In some embodiments, U is followed by natural phosphate linkage (PO). In some embodiments, C is followed by Sp. In some embodiments, C is followed by Rp. In some embodiments, C is followed by natural phosphate linkage (PO). In some embodiments, G is followed by Sp. In some embodiments, G is followed by Rp. In some embodiments, G is followed by natural phosphate linkage (PO). In some embodiments, C and U are followed by Sp. In some embodiments, C and U are followed by Rp. In some embodiments, C and U are followed by natural phosphate linkage (PO). In some embodiments, A and G are followed by Sp. In some embodiments, A and G are followed by Rp.

[0456] In some embodiments, the antisense strand comprises phosphorothioate internucleotide linkages between nucleotide positions 21 and 22, and between nucleotide positions 22 and 23, wherein the antisense strand contains at least one thermally destabilizing modification of the duplex located in the seed region of the antisense strand (i.e., at position 2-9 of the 5′-end of the antisense strand), and wherein the dsRNA optionally further has at least one (e.g., one, two, three, four, five, six, seven or all eight) of the following characteristics: (i) the antisense comprises 2, 3, 4, 5, or 6 2′-fluoro modifications; (ii) the antisense comprises 3, 4, or 5 phosphorothioate internucleotide linkages; (iii) the sense strand is conjugated with a ligand; (iv) the sense strand comprises 2, 3, 4 or 5 2′-fluoro modifications; (v) the sense strand comprises 1, 2, 3, 4, or 5 phosphorothioate internucleotide linkages; (vi) the dsRNA comprises at least four 2′-fluoro modifications; (vii) the dsRNA comprises a duplex region of 12-40 nucleotide pairs in length; and (viii) the dsRNA has a blunt end at 5′-end of the antisense strand. In some embodiments, the antisense strand comprises phosphorothioate internucleotide linkages between nucleotide positions 1 and 2, between nucleotide positions 2 and 3, between nucleotide positions 21 and 22, and between nucleotide positions 22 and 23, wherein the antisense strand contains at least one thermally destabilizing modification of the duplex located in the seed region of the antisense strand (i.e., at position 2-9 of the 5′-end of the antisense strand), and wherein the dsRNA optionally further has at least one (e.g., one, two, three, four, five, six, seven or all eight) of the following characteristics: (i) the antisense comprises 2, 3, 4, 5, or 6 2′-fluoro modifications; (ii) the sense strand is conjugated with a ligand; (iii) the sense strand comprises 2, 3, 4 or 5 2′-fluoro modifications; (iv) the sense strand comprises 1, 2, 3, 4, or 5 phosphorothioate internucleotide linkages; (v) the dsRNA comprises at least four 2′-fluoro modifications; (vi) the dsRNA comprises a duplex region of 12-40 nucleotide pairs in length; (vii) the dsRNA comprises a duplex region of 12-40 nucleotide pairs in length; and (viii) the dsRNA has a blunt end at 5′-end of the antisense strand.

[0457] In some embodiments, the sense strand comprises phosphorothioate internucleotide linkages between nucleotide positions 1 and 2, and between nucleotide positions 2 and 3, wherein the antisense strand contains at least one thermally destabilizing modification of the duplex located in the seed region of the antisense strand (i.e., at position 2-9 of the 5′-end of the antisense strand), and wherein the dsRNA optionally further has at least one (e.g., one, two, three, four, five, six, seven or all eight) of the following characteristics: (i) the antisense comprises 2, 3, 4, 5, or 6 2′-fluoro modifications; (ii) the antisense comprises 1, 2, 3, 4, or 5 phosphorothioate internucleotide linkages; (iii) the sense strand is conjugated with a ligand; (iv) the sense strand comprises 2, 3, 4 or 5 2′-fluoro modifications; (v) the sense strand comprises 3, 4 or 5 phosphorothioate internucleotide linkages; (vi) the dsRNA comprises at least four 2′-fluoro modifications; (vii) the dsRNA comprises a duplex region of 12-40 nucleotide pairs in length; and (viii) the dsRNA has a blunt end at 5′-end of the antisense strand.

[0458] In some embodiments, the sense strand comprises phosphorothioate internucleotide linkages between nucleotide positions 1 and 2, and between nucleotide positions 2 and 3, the antisense strand comprises phosphorothioate internucleotide linkages between nucleotide positions 1 and 2, between nucleotide positions 2 and 3, between nucleotide positions 21 and 22, and between nucleotide positions 22 and 23, wherein the antisense strand contains at least one thermally destabilizing modification of the duplex located in the seed region of the antisense strand (i.e., at position 2-9 of the 5′-end of the antisense strand), and wherein the dsRNA optionally further has at least one (e.g., one, two, three, four, five, six or all seven) of the following characteristics: (i) the antisense comprises 2, 3, 4, 5 or 6 2′-fluoro modifications; (ii) the sense strand is conjugated with a ligand; (iii) the sense strand comprises 2, 3, 4 or 5 2′-fluoro modifications; (iv) the sense strand comprises 3, 4 or 5 phosphorothioate internucleotide linkages; (v) the dsRNA comprises at least four 2′-fluoro modifications; (vi) the dsRNA comprises a duplex region of 12-40 nucleotide pairs in length; and (vii) the dsRNA has a blunt end at 5′-end of the antisense strand.

[0459] In some embodiments, the dsRNA molecule of the disclosure comprises mismatch(es) with the target, within the duplex, or combinations thereof. The mismatch can occur in the overhang region or the duplex region. The base pair can be ranked on the basis of their propensity to promote dissociation or melting (e.g., on the free energy of association or dissociation of a particular pairing, the simplest approach is to examine the pairs on an individual pair basis, though next neighbor or similar analysis can also be used). In terms of promoting dissociation: A:U is preferred over G:C; G:U is preferred over G:C; and I:C is preferred over G:C (I=inosine). Mismatches, e.g., non-canonical or other than canonical pairings (as described elsewhere herein) are preferred over canonical (A:T, A:U, G:C) pairings; and pairings which include a universal base are preferred over canonical pairings.

[0460] In some embodiments, the dsRNA molecule of the disclosure comprises at least one of the first 1, 2, 3, 4, or 5 base pairs within the duplex regions from the 5′-end of the antisense strand can be chosen independently from the group of: A:U, G:U, I:C, and mismatched pairs, e.g., non-canonical or other than canonical pairings or pairings which include a universal base, to promote the dissociation of the antisense strand at the 5′-end of the duplex.

[0461] In some embodiments, the nucleotide at the 1 position within the duplex region from the 5′-end in the antisense strand is selected from the group consisting of A, dA, dU, U, and dT. Alternatively, at least one of the first 1, 2 or 3 base pair within the duplex region from the 5′-end of the antisense strand is an AU base pair. For example, the first base pair within the duplex region from the 5′-end of the antisense strand is an AU base pair.

[0462] It was found that introducing 4′-modified or 5′-modified nucleotide to the 3′-end of a phosphodiester (PO), phosphorothioate (PS), or phosphorodithioate (PS2) linkage of a nucleotide at any position of single stranded or double stranded oligonucleotide can exert steric effect to the internucleotide linkage and, hence, protecting or stabilizing it against nucleases.

[0463] In some embodiments, 5′-modified nucleotide is introduced at the 3′-end of a dinucleotide at any position of single stranded or double stranded siRNA. For instance, a 5′-alkylated nucleotide may be introduced at the 3′-end of a dinucleotide at any position of single stranded or double stranded siRNA. The alkyl group at the 5′ position of the ribose sugar can be racemic or chirally pure R or S isomer. An exemplary 5′-alkylated nucleoside is 5′-methyl nucleotide. The 5′-methyl can be either racemic or chirally pure R or S isomer.

[0464] In some embodiments, 4′-modified nucleotide is introduced at the 3′-end of a dinucleotide at any position of single stranded or double stranded siRNA. For instance, a 4′-alkylated nucleotide may be introduced at the 3′-end of a dinucleotide at any position of single stranded or double stranded siRNA. The alkyl group at the 4′ position of the ribose sugar can be racemic or chirally pure R or S isomer. An exemplary 4′-alkylated nucleotide is 4′-methyl nucleoside. The 4′-methyl can be either racemic or chirally pure R or S isomer. Alternatively, a 4′-O-alkylated nucleotide may be introduced at the 3′-end of a dinucleotide at any position of single stranded or double stranded siRNA. The 4′-O-alkyl of the ribose sugar can be racemic or chirally pure R or S isomer. An exemplary 4′-O-alkylated nucleotide is 4′-O-methyl nucleoside. The 4′-O-methyl can be either racemic or chirally pure R or S isomer.

[0465] In some embodiments, 5′-alkylated nucleotide is introduced at any position on the sense strand or antisense strand of a dsRNA, and such modification maintains or improves potency of the dsRNA. The 5′-alkyl can be either racemic or chirally pure R or S isomer. An exemplary 5′-alkylated nucleotide is 5′-methyl nucleotide. The 5′-methyl can be either racemic or chirally pure R or S isomer.

[0466] In some embodiments, 4′-alkylated nucleotide is introduced at any position on the sense strand or antisense strand of a dsRNA, and such modification maintains or improves potency of the dsRNA. The 4′-alkyl can be either racemic or chirally pure R or S isomer. An exemplary 4′-alkylated nucleotide is 4′-methyl nucleoside. The 4′-methyl can be either racemic or chirally pure R or S isomer.

[0467] In some embodiments, 4′-O-alkylated nucleotide is introduced at any position on the sense strand or antisense strand of a dsRNA, and such modification maintains or improves potency of the dsRNA. The 5′-alkyl can be either racemic or chirally pure R or S isomer. An exemplary 4′-O-alkylated nucleotide is 4′-O-methyl nucleotide. The 4′-O-methyl can be either racemic or chirally pure R or S isomer.

[0468] In some embodiments, the dsRNA molecule of the disclosure can comprise 2′-5′ linkages (with 2′-H, 2′-OH and 2′-OMe and with P═O or P═S). For example, the 2′-5′ linkages modifications can be used to promote nuclease resistance or to inhibit binding of the sense to the antisense strand, or can be used at the 5′ end of the sense strand to avoid sense strand activation by RISC.

[0469] In another embodiment, the dsRNA molecule of the disclosure can comprise L sugars (e.g., L ribose, L-arabinose with 2′-H, 2′-OH and 2′-OMe). For example, these L sugars modifications can be used to promote nuclease resistance or to inhibit binding of the sense to the antisense strand, or can be used at the 5′ end of the sense strand to avoid sense strand activation by RISC.

[0470] Various publications describe multimeric siRNA which can all be used with the dsRNA of the disclosure. Such publications include WO2007/091269, U.S. Pat. No. 7,858,769, WO2010/141511, WO2007/117686, WO2009/014887, and WO2011/031520 which are hereby incorporated by their entirely.

[0471] As described in more detail below, the RNAi agent that contains conjugations of one or more carbohydrate moieties to an RNAi agent can optimize one or more properties of the RNAi agent. In many cases, the carbohydrate moiety will be attached to a modified subunit of the RNAi agent. For example, the ribose sugar of one or more ribonucleotide subunits of a dsRNA agent can be replaced with another moiety, e.g., a non-carbohydrate (such as, cyclic) carrier to which is attached a carbohydrate ligand. A ribonucleotide subunit in which the ribose sugar of the subunit has been so replaced is referred to herein as a ribose replacement modification subunit (RRMS). A cyclic carrier may be a carbocyclic ring system, i.e., all ring atoms are carbon atoms, or a heterocyclic ring system, i.e., one or more ring atoms may be a heteroatom, e.g., nitrogen, oxygen, sulfur. The cyclic carrier may be a monocyclic ring system, or may contain two or more rings, e.g. fused rings. The cyclic carrier may be a fully saturated ring system, or it may contain one or more double bonds.

[0472] The ligand may be attached to the polynucleotide via a carrier. The carriers include (i) at least one “backbone attachment point,” such as two “backbone attachment points” and (ii) at least one “tethering attachment point.” A “backbone attachment point” as used herein refers to a functional group, e.g. a hydroxyl group, or generally, a bond available for, and that is suitable for incorporation of the carrier into the backbone, e.g., the phosphate, or modified phosphate, e.g., sulfur containing, backbone, of a ribonucleic acid. A “tethering attachment point” (TAP) in some embodiments refers to a constituent ring atom of the cyclic carrier, e.g., a carbon atom or a heteroatom (distinct from an atom which provides a backbone attachment point), that connects a selected moiety. The moiety can be, e.g., a carbohydrate, e.g. monosaccharide, disaccharide, trisaccharide, tetrasaccharide, oligosaccharide and polysaccharide. Optionally, the selected moiety is connected by an intervening tether to the cyclic carrier. Thus, the cyclic carrier will often include a functional group, e.g., an amino group, or generally, provide a bond, that is suitable for incorporation or tethering of another chemical entity, e.g., a ligand to the constituent ring.

[0473] The RNAi agents may be conjugated to a ligand via a carrier, wherein the carrier can be cyclic group or acyclic group. For example, the cyclic group can be selected from pyrrolidinyl, pyrazolinyl, pyrazolidinyl, imidazolinyl, imidazolidinyl, piperidinyl, piperazinyl, [1,3]dioxolane, oxazolidinyl, isoxazolidinyl, morpholinyl, thiazolidinyl, isothiazolidinyl, quinoxalinyl, pyridazinonyl, tetrahydrofuryl and decalin. The acyclic group is selected from, for example, serinol backbone or diethanolamine backbone.

[0474] In certain specific embodiments, the RNAi agent for use in the methods of the disclosure is an agent selected from the group of agents listed in any one of Tables 2-3. These agents may further comprise a ligand, such as one or more lipophilic moieties, one or more GalNAc derivatives, or both of one of more lipophilic moieties and one or more GalNAc derivatives.

IV. iRNAs Conjugated to Ligands

[0475] Another modification of the RNA of an iRNA of the invention involves chemically linking to the iRNA one or more ligands, moieties or conjugates that enhance the activity, cellular distribution or cellular uptake of the iRNA, e.g., into a cell. Such moieties include but are not limited to lipid moieties such as a cholesterol moiety (Letsinger et al., Proc. Natl. Acid. Sci. USA, 1989, 86: 6553-6556), cholic acid (Manoharan et al., Biorg. Med. Chem. Let., 1994, 4:1053-1060), a thioether, e.g., beryl-S-tritylthiol (Manoharan et al., Ann. N. Y. Acad. Sci., 1992, 660:306-309; Manoharan et al., Biorg. Med. Chem. Let., 1993, 3:2765-2770), a thiocholesterol (Oberhauser et al., Nucl. Acids Res., 1992, 20:533-538), an aliphatic chain, e.g., dodecandiol or undecyl residues (Saison-Behmoaras et al., EMBO J, 1991, 10:1111-1118; Kabanov et al., FEBS Lett., 1990, 259:327-330; Svinarchuk et al., Biochimie, 1993, 75:49-54), a phospholipid, e.g., di-hexadecyl-rac-glycerol or triethyl-ammonium 1,2-di-O-hexadecyl-rac-glycero-3-phosphonate (Manoharan et al., Tetrahedron Lett., 1995, 36:3651-3654; Shea et al., Nucl. Acids Res., 1990, 18:3777-3783), a polyamine or a polyethylene glycol chain (Manoharan et al., Nucleosides & Nucleotides, 1995, 14:969-973), or adamantane acetic acid (Manoharan et al., Tetrahedron Lett., 1995, 36:3651-3654), a palmityl moiety (Mishra et al., Biochim. Biophys. Acta, 1995, 1264:229-237), or an octadecylamine or hexylamino-carbonyloxycholesterol moiety (Crooke et al., J. Pharmacol. Exp. Ther., 1996, 277:923-937).

[0476] In certain embodiments, a ligand alters the distribution, targeting or lifetime of an iRNA agent into which it is incorporated. In some embodiments, a ligand provides an enhanced affinity for a selected target, e.g., molecule, cell or cell type, compartment, e.g., a cellular or organ compartment, tissue, organ or region of the body, as, e.g., compared to a species absent such a ligand. Typical ligands will not take part in duplex pairing in a duplexed nucleic acid.

[0477] Ligands can include a naturally occurring substance, such as a protein (e.g., human serum albumin (HSA), low-density lipoprotein (LDL), or globulin); carbohydrate (e.g., a dextran, pullulan, chitin, chitosan, inulin, cyclodextrin or hyaluronic acid); or a lipid. The ligand may also be a recombinant or synthetic molecule, such as a synthetic polymer, e.g., a synthetic polyamino acid. Examples of polyamino acids include polyamino acid is a polylysine (PLL), poly L-aspartic acid, poly L-glutamic acid, styrene-maleic acid anhydride copolymer, poly(L-lactide-co-glycolied) copolymer, divinyl ether-maleic anhydride copolymer, N-(2-hydroxypropyl)methacrylamide copolymer (HMPA), polyethylene glycol (PEG), polyvinyl alcohol (PVA), polyurethane, poly(2-ethylacryllic acid), N-isopropylacrylamide polymers, or polyphosphazine. Example of polyamines include: polyethylenimine, polylysine (PLL), spermine, spermidine, polyamine, pseudopeptide-polyamine, peptidomimetic polyamine, dendrimer polyamine, arginine, amidine, protamine, cationic lipid, cationic porphyrin, quaternary salt of a polyamine, or an α helical peptide.

[0478] Ligands can also include targeting groups, e.g., a cell or tissue targeting agent, e.g., a lectin, glycoprotein, lipid or protein, e.g., an antibody, that binds to a specified cell type such as a kidney cell. A targeting group can be a thyrotropin, melanotropin, lectin, glycoprotein, surfactant protein A, Mucin carbohydrate, multivalent lactose, multivalent galactose, N-acetyl-galactosamine, N-acetyl-glucosamine multivalent mannose, multivalent fucose, glycosylated polyaminoacids, multivalent galactose, transferrin, bisphosphonate, polyglutamate, polyaspartate, a lipid, cholesterol, a steroid, bile acid, folate, vitamin B12, biotin, or an RGD peptide or RGD peptide mimetic. In certain embodiments, the ligand is a multivalent galactose, e.g., an N-acetyl-galactosamine.

[0479] Other examples of ligands include dyes, intercalating agents (e.g. acridines), cross-linkers (e.g. psoralene, mitomycin C), porphyrins (TPPC4, texaphyrin, Sapphyrin), polycyclic aromatic hydrocarbons (e.g., phenazine, dihydrophenazine), artificial endonucleases (e.g. EDTA), lipophilic molecules, e.g., cholesterol, cholic acid, adamantane acetic acid, 1-pyrene butyric acid, dihydrotestosterone, 1,3-Bis-O(hexadecyl)glycerol, geranyloxyhexyl group, hexadecylglycerol, borneol, menthol, 1,3-propanediol, heptadecyl group, palmitic acid, myristic acid, O3-(oleoyl)lithocholic acid, O3-(oleoyl)cholenic acid, dimethoxytrityl, or phenoxazine) and peptide conjugates (e.g., antennapedia peptide, Tat peptide), alkylating agents, phosphate, amino, mercapto, PEG (e.g., PEG-40K), MPEG, [MPEG]₂, polyamino, alkyl, substituted alkyl, radiolabeled markers, enzymes, haptens (e.g. biotin), transport/absorption facilitators (e.g., aspirin, vitamin E, folic acid), synthetic ribonucleases (e.g., imidazole, bisimidazole, histamine, imidazole clusters, acridine-imidazole conjugates, Eu3+ complexes of tetraazamacrocycles), dinitrophenyl, HRP, or AP.

[0480] Ligands can be proteins, e.g., glycoproteins, or peptides, e.g., molecules having a specific affinity for a co-ligand, or antibodies e.g., an antibody, that binds to a specified cell type such as a cancer cell, endothelial cell, or bone cell. Ligands may also include hormones and hormone receptors. They can also include non-peptidic species, such as lipids, lectins, carbohydrates, vitamins, cofactors, multivalent lactose, multivalent galactose, N-acetyl-galactosamine, N-acetyl-glucosamine multivalent mannose, or multivalent fucose. The ligand can be, for example, a lipopolysaccharide, an activator of p38 MAP kinase, or an activator of NF-κB.

[0481] The ligand can be a substance, e.g., a drug, which can increase the uptake of the iRNA agent into the cell, for example, by disrupting the cell's cytoskeleton, e.g., by disrupting the cell's microtubules, microfilaments, or intermediate filaments. The drug can be, for example, taxon, vincristine, vinblastine, cytochalasin, nocodazole, japlakinolide, latrunculin A, phalloidin, swinholide A, indanocine, or myoservin.

[0482] In some embodiments, a ligand attached to an iRNA as described herein acts as a pharmacokinetic modulator (PK modulator). PK modulators include lipophiles, bile acids, steroids, phospholipid analogues, peptides, protein binding agents, PEG, vitamins etc. Exemplary PK modulators include, but are not limited to, cholesterol, fatty acids, cholic acid, lithocholic acid, dialkylglycerides, diacylglyceride, phospholipids, sphingolipids, naproxen, ibuprofen, vitamin E, biotin etc. Oligonucleotides that comprise a number of phosphorothioate linkages are also known to bind to serum protein, thus short oligonucleotides, e.g., oligonucleotides of about 5 bases, 10 bases, 15 bases or 20 bases, comprising multiple of phosphorothioate linkages in the backbone are also amenable to the present invention as ligands (e.g. as PK modulating ligands). In addition, aptamers that bind serum components (e.g. serum proteins) are also suitable for use as PK modulating ligands in the embodiments described herein.

[0483] Ligand-conjugated iRNAs of the invention may be synthesized by the use of an oligonucleotide that bears a pendant reactive functionality, such as that derived from the attachment of a linking molecule onto the oligonucleotide (described below). This reactive oligonucleotide may be reacted directly with commercially-available ligands, ligands that are synthesized bearing any of a variety of protecting groups, or ligands that have a linking moiety attached thereto.

[0484] The oligonucleotides used in the conjugates of the present invention may be conveniently and routinely made through the well-known technique of solid-phase synthesis. Equipment for such synthesis is sold by several vendors including, for example, Applied Biosystems® (Foster City, Calif.). Any other means for such synthesis known in the art may additionally or alternatively be employed. It is also known to use similar techniques to prepare other oligonucleotides, such as the phosphorothioates and alkylated derivatives.

[0485] In the ligand-conjugated oligonucleotides and ligand-molecule bearing sequence-specific linked nucleosides of the present invention, the oligonucleotides and oligonucleosides may be assembled on a suitable DNA synthesizer utilizing standard nucleotide or nucleoside precursors, or nucleotide or nucleoside conjugate precursors that already bear the linking moiety, ligand-nucleotide or nucleoside-conjugate precursors that already bear the ligand molecule, or non-nucleoside ligand-bearing building blocks.

[0486] When using nucleotide-conjugate precursors that already bear a linking moiety, the synthesis of the sequence-specific linked nucleosides is typically completed, and the ligand molecule is then reacted with the linking moiety to form the ligand-conjugated oligonucleotide. In some embodiments, the oligonucleotides or linked nucleosides of the present invention are synthesized by an automated synthesizer using phosphoramidites derived from ligand-nucleoside conjugates in addition to the standard phosphoramidites and non-standard phosphoramidites that are commercially available and routinely used in oligonucleotide synthesis.

[0487] A. Lipid Conjugates

[0488] In certain embodiments, the ligand or conjugate is a lipid or lipid-based molecule. Such a lipid or lipid-based molecule can typically bind a serum protein, such as human serum albumin (HSA). An HSA binding ligand allows for distribution of the conjugate to a target tissue, e.g., a non-kidney target tissue of the body. For example, the target tissue can be the liver, including parenchymal cells of the liver. Other molecules that can bind HSA can also be used as ligands. For example, naproxen or aspirin can be used. A lipid or lipid-based ligand can (a) increase resistance to degradation of the conjugate, (b) increase targeting or transport into a target cell or cell membrane, or (c) can be used to adjust binding to a serum protein, e.g., HSA.

[0489] A lipid-based ligand can be used to modulate, e.g., control (e.g., inhibit) the binding of the conjugate to a target tissue. For example, a lipid or lipid-based ligand that binds to HSA more strongly will be less likely to be targeted to the kidney and therefore less likely to be cleared from the body. A lipid or lipid-based ligand that binds to HSA less strongly can be used to target the conjugate to the kidney.

[0490] In certain embodiments, the lipid-based ligand binds HSA. For example, the ligand can bind HSA with a sufficient affinity such that distribution of the conjugate to a non-kidney tissue is enhanced. However, the affinity is typically not so strong that the HSA-ligand binding cannot be reversed.

[0491] In certain embodiments, the lipid-based ligand binds HSA weakly or not at all, such that distribution of the conjugate to the kidney is enhanced. Other moieties that target to kidney cells can also be used in place of or in addition to the lipid-based ligand.

[0492] In another aspect, the ligand is a moiety, e.g., a vitamin, which is taken up by a target cell, e.g., a proliferating cell. These are particularly useful for treating disorders characterized by unwanted cell proliferation, e.g., of the malignant or non-malignant type, e.g., cancer cells. Exemplary vitamins include vitamin A, E, and K. Other exemplary vitamins include are B vitamin, e.g., folic acid, B12, riboflavin, biotin, pyridoxal or other vitamins or nutrients taken up by cancer cells. Also included are HSA and low density lipoprotein (LDL).

[0493] B. Cell Permeation Agents

[0494] In another aspect, the ligand is a cell-permeation agent, such as a helical cell-permeation agent. In certain embodiments, the agent is amphipathic. An exemplary agent is a peptide such as tat or antennopedia. If the agent is a peptide, it can be modified, including a peptidylmimetic, invertomers, non-peptide or pseudo-peptide linkages, and use of D-amino acids. The helical agent is typically an α-helical agent and can have a lipophilic and a lipophobic phase.

[0495] The ligand can be a peptide or peptidomimetic. A peptidomimetic (also referred to herein as an oligopeptidomimetic) is a molecule capable of folding into a defined three-dimensional structure similar to a natural peptide. The attachment of peptide and peptidomimetics to iRNA agents can affect pharmacokinetic distribution of the iRNA, such as by enhancing cellular recognition and absorption. The peptide or peptidomimetic moiety can be about 5-50 amino acids long, e.g., about 5, 10, 15, 20, 25, 30, 35, 40, 45, or 50 amino acids long.

[0496] A peptide or peptidomimetic can be, for example, a cell permeation peptide, cationic peptide, amphipathic peptide, or hydrophobic peptide (e.g., consisting primarily of Tyr, Trp, or Phe). The peptide moiety can be a dendrimer peptide, constrained peptide or crosslinked peptide. In another alternative, the peptide moiety can include a hydrophobic membrane translocation sequence (MTS). An exemplary hydrophobic MTS-containing peptide is RFGF having the amino acid sequence AAVALLPAVLLALLAP (SEQ ID NO: 9). An RFGF analogue (e.g., amino acid sequence AALLPVLLAAP (SEQ ID NO: 10)) containing a hydrophobic MTS can also be a targeting moiety. The peptide moiety can be a “delivery” peptide, which can carry large polar molecules including peptides, oligonucleotides, and protein across cell membranes. For example, sequences from the HIV Tat protein (GRKKRRQRRRPPQ (SEQ ID NO: 11)) and the Drosophila Antennapedia protein (RQIKIWFQNRRMKWKK (SEQ ID NO: 12)) have been found to be capable of functioning as delivery peptides. A peptide or peptidomimetic can be encoded by a random sequence of DNA, such as a peptide identified from a phage-display library, or one-bead-one-compound (OBOC) combinatorial library (Lam et al., Nature, 354:82-84, 1991). Typically, the peptide or peptidomimetic tethered to a dsRNA agent via an incorporated monomer unit is a cell targeting peptide such as an arginine-glycine-aspartic acid (RGD)-peptide, or RGD mimic. A peptide moiety can range in length from about 5 amino acids to about 40 amino acids. The peptide moieties can have a structural modification, such as to increase stability or direct conformational properties. Any of the structural modifications described below can be utilized.

[0497] An RGD peptide for use in the compositions and methods of the invention may be linear or cyclic, and may be modified, e.g., glycosylated or methylated, to facilitate targeting to a specific tissue(s). RGD-containing peptides and peptidiomimemtics may include D-amino acids, as well as synthetic RGD mimics. In addition to RGD, one can use other moieties that target the integrin ligand, such as PECAM-1 or VEGF.

[0498] An RGD peptide moiety can be used to target a particular cell type, e.g., a tumor cell, such as an endothelial tumor cell or a breast cancer tumor cell (Zitzmann et al., Cancer Res., 62:5139-43, 2002). An RGD peptide can facilitate targeting of an dsRNA agent to tumors of a variety of other tissues, including the lung, kidney, spleen, or liver (Aoki et al., Cancer Gene Therapy 8:783-787, 2001). Typically, the RGD peptide will facilitate targeting of an iRNA agent to the kidney. The RGD peptide can be linear or cyclic, and can be modified, e.g., glycosylated or methylated to facilitate targeting to specific tissues. For example, a glycosylated RGD peptide can deliver an iRNA agent to a tumor cell expressing avB3 (Haubner et al., Jour. Nucl. Med., 42:326-336, 2001).

[0499] A “cell permeation peptide” is capable of permeating a cell, e.g., a microbial cell, such as a bacterial or fungal cell, or a mammalian cell, such as a human cell. A microbial cell-permeating peptide can be, for example, an α-helical linear peptide (e.g., LL-37 or Ceropin P1), a disulfide bond-containing peptide (e.g., α-defensin, β-defensin or bactenecin), or a peptide containing only one or two dominating amino acids (e.g., PR-39 or indolicidin). A cell permeation peptide can also include a nuclear localization signal (NLS). For example, a cell permeation peptide can be a bipartite amphipathic peptide, such as MPG, which is derived from the fusion peptide domain of HIV-1 gp41 and the NLS of SV40 large T antigen (Simeoni et al., Nucl. Acids Res. 31:2717-2724, 2003).

[0500] C. Carbohydrate Conjugates

[0501] In some embodiments of the compositions and methods of the invention, an iRNA further comprises a carbohydrate. The carbohydrate conjugated iRNA are advantageous for the in vivo delivery of nucleic acids, as well as compositions suitable for in vivo therapeutic use, as described herein. As used herein, “carbohydrate” refers to a compound which is either a carbohydrate per se made up of one or more monosaccharide units having at least 6 carbon atoms (which can be linear, branched or cyclic) with an oxygen, nitrogen or sulfur atom bonded to each carbon atom; or a compound having as a part thereof a carbohydrate moiety made up of one or more monosaccharide units each having at least six carbon atoms (which can be linear, branched or cyclic), with an oxygen, nitrogen or sulfur atom bonded to each carbon atom. Representative carbohydrates include the sugars (mono-, di-, tri- and oligosaccharides containing from about 4, 5, 6, 7, 8, or 9 monosaccharide units), and polysaccharides such as starches, glycogen, cellulose and polysaccharide gums. Specific monosaccharides include C5 and above (e.g., C5, C6, C7, or C8) sugars; di- and tri-saccharides include sugars having two or three monosaccharide units (e.g., C5, C6, C7, or C8).

[0502] In certain embodiments, a carbohydrate conjugate comprises a monosaccharide.

[0503] In certain embodiments, the monosaccharide is an N-acetylgalactosamine (GalNAc). GalNAc conjugates, which comprise one or more N-acetylgalactosamine (GalNAc) derivatives, are described, for example, in U.S. Pat. No. 8,106,022, the entire content of which is hereby incorporated herein by reference. In some embodiments, the GalNAc conjugate serves as a ligand that targets the iRNA to particular cells. In some embodiments, the GalNAc conjugate targets the iRNA to liver cells, e.g., by serving as a ligand for the asialoglycoprotein receptor of liver cells (e.g., hepatocytes).

[0504] In some embodiments, the carbohydrate conjugate comprises one or more GalNAc derivatives. The GalNAc derivatives may be attached via a linker, e.g., a bivalent or trivalent branched linker. In some embodiments the GalNAc conjugate is conjugated to the 3′ end of the sense strand. In some embodiments, the GalNAc conjugate is conjugated to the iRNA agent (e.g., to the 3′ end of the sense strand) via a linker, e.g., a linker as described herein. In some embodiments the GalNAc conjugate is conjugated to the 5′ end of the sense strand. In some embodiments, the GalNAc conjugate is conjugated to the iRNA agent (e.g., to the 5′ end of the sense strand) via a linker, e.g., a linker as described herein.

[0505] In certain embodiments of the invention, the GalNAc or GalNAc derivative is attached to an iRNA agent of the invention via a monovalent linker. In some embodiments, the GalNAc or GalNAc derivative is attached to an iRNA agent of the invention via a bivalent linker. In yet other embodiments of the invention, the GalNAc or GalNAc derivative is attached to an iRNA agent of the invention via a trivalent linker. In other embodiments of the invention, the GalNAc or GalNAc derivative is attached to an iRNA agent of the invention via a tetravalent linker.

[0506] In certain embodiments, the double stranded RNAi agents of the invention comprise one GalNAc or GalNAc derivative attached to the iRNA agent. In certain embodiments, the double stranded RNAi agents of the invention comprise a plurality (e.g., 2, 3, 4, 5, or 6) GalNAc or GalNAc derivatives, each independently attached to a plurality of nucleotides of the double stranded RNAi agent through a plurality of monovalent linkers.

[0507] In some embodiments, for example, when the two strands of an iRNA agent of the invention are part of one larger molecule connected by an uninterrupted chain of nucleotides between the 3′-end of one strand and the 5′-end of the respective other strand forming a hairpin loop comprising, a plurality of unpaired nucleotides, each unpaired nucleotide within the hairpin loop may independently comprise a GalNAc or GalNAc derivative attached via a monovalent linker. The hairpin loop may also be formed by an extended overhang in one strand of the duplex.

[0508] In some embodiments, for example, when the two strands of an iRNA agent of the invention are part of one larger molecule connected by an uninterrupted chain of nucleotides between the 3′-end of one strand and the 5′-end of the respective other strand forming a hairpin loop comprising, a plurality of unpaired nucleotides, each unpaired nucleotide within the hairpin loop may independently comprise a GalNAc or GalNAc derivative attached via a monovalent linker. The hairpin loop may also be formed by an extended overhang in one strand of the duplex.

[0509] In some embodiments, the GalNAc conjugate is

[chemical structure]

[0510] In some embodiments, the RNAi agent is attached to the carbohydrate conjugate via a linker as shown in the following schematic, wherein X is O or S

[chemical structure]

[0511] In some embodiments, the RNAi agent is conjugated to L96 as defined in Table 1 and shown below:

[chemical structure]

[0512] In certain embodiments, a carbohydrate conjugate for use in the compositions and methods of the invention is selected from the group consisting of:

[chemical structure]

[chemical structure]

[chemical structure]

[chemical structure]

[chemical structure]

[chemical structure]

[chemical structure]

[chemical structure]

[0513] In certain embodiments, a carbohydrate conjugate for use in the compositions and methods of the invention is a monosaccharide. In certain embodiments, the monosaccharide is an N-acetylgalactosamine, such as

[chemical structure]

[0514] Another representative carbohydrate conjugate for use in the embodiments described herein includes, but is not limited to,

[chemical structure]

[0515] when one of X or Y is an oligonucleotide, the other is a hydrogen.

[0516] In some embodiments, a suitable ligand is a ligand disclosed in WO 2019/055633, the entire contents of which are incorporated herein by reference. In one embodiment the ligand comprises the structure below:

[chemical structure]

[0517] In certain embodiments, the RNAi agents of the disclosure may include GalNAc ligands, even if such GalNAc ligands are currently projected to be of limited value for the intrathecal/CNS delivery route(s) of the instant disclosure.

[0518] In certain embodiments of the invention, the GalNAc or GalNAc derivative is attached to an iRNA agent of the invention via a monovalent linker. In some embodiments, the GalNAc or GalNAc derivative is attached to an iRNA agent of the invention via a bivalent linker. In yet other embodiments of the invention, the GalNAc or GalNAc derivative is attached to an iRNA agent of the invention via a trivalent linker. In other embodiments of the invention, the GalNAc or GalNAc derivative is attached to an iRNA agent of the invention via a tetravalent linker.

[0519] In certain embodiments, the double stranded RNAi agents of the invention comprise one GalNAc or GalNAc derivative attached to the iRNA agent, e.g., the 5′end of the sense strand of a dsRNA agent, or the 5′ end of one or both sense strands of a dual targeting RNAi agent as described herein. In certain embodiments, the double stranded RNAi agents of the invention comprise a plurality (e.g., 2, 3, 4, 5, or 6) GalNAc or GalNAc derivatives, each independently attached to a plurality of nucleotides of the double stranded RNAi agent through a plurality of monovalent linkers.

[0520] In some embodiments, for example, when the two strands of an iRNA agent of the invention are part of one larger molecule connected by an uninterrupted chain of nucleotides between the 3′-end of one strand and the 5′-end of the respective other strand forming a hairpin loop comprising, a plurality of unpaired nucleotides, each unpaired nucleotide within the hairpin loop may independently comprise a GalNAc or GalNAc derivative attached via a monovalent linker.

[0521] In some embodiments, the carbohydrate conjugate further comprises one or more additional ligands as described above, such as, but not limited to, a PK modulator or a cell permeation peptide.

[0522] Additional carbohydrate conjugates and linkers suitable for use in the present invention include those described in WO 2014/179620 and WO 2014/179627, the entire contents of each of which are incorporated herein by reference.

[0523] D. Linkers

[0524] In some embodiments, the conjugate or ligand described herein can be attached to an iRNA oligonucleotide with various linkers that can be cleavable or non-cleavable.

[0525] The term “linker” or “linking group” means an organic moiety that connects two parts of a compound, e.g., covalently attaches two parts of a compound. Linkers typically comprise a direct bond or an atom such as oxygen or sulfur, a unit such as NR8, C(O), C(O)NH, SO, SO₂, SO₂NH or a chain of atoms, such as, but not limited to, substituted or unsubstituted alkyl, substituted or unsubstituted alkenyl, substituted or unsubstituted alkynyl, arylalkyl, arylalkenyl, arylalkynyl, heteroarylalkyl, heteroarylalkenyl, heteroarylalkynyl, heterocyclylalkyl, heterocyclylalkenyl, heterocyclylalkynyl, aryl, heteroaryl, heterocyclyl, cycloalkyl, cycloalkenyl, alkylarylalkyl, alkylarylalkenyl, alkylarylalkynyl, alkenylarylalkyl, alkenylarylalkenyl, alkenylarylalkynyl, alkynylarylalkyl, alkynylarylalkenyl, alkynylarylalkynyl, alkylheteroarylalkyl, alkylheteroarylalkenyl, alkylheteroarylalkynyl, alkenylheteroarylalkyl, alkenylheteroarylalkenyl, alkenylheteroarylalkynyl, alkynylheteroarylalkyl, alkynylheteroarylalkenyl, alkynylheteroarylalkynyl, alkylheterocyclylalkyl, alkylheterocyclylalkenyl, alkylhererocyclylalkynyl, alkenylheterocyclylalkyl, alkenylheterocyclylalkenyl, alkenylheterocyclylalkynyl, alkynylheterocyclylalkyl, alkynylheterocyclylalkenyl, alkynylheterocyclylalkynyl, alkylaryl, alkenylaryl, alkynylaryl, alkylheteroaryl, alkenylheteroaryl, alkynylhereroaryl, which one or more methylenes can be interrupted or terminated by O, S, S(O), SO₂, N(R8), C(O), substituted or unsubstituted aryl, substituted or unsubstituted heteroaryl, substituted or unsubstituted heterocyclic; where R8 is hydrogen, acyl, aliphatic or substituted aliphatic. In certain embodiments, the linker is between about 1-24 atoms, 2-24, 3-24, 4-24, 5-24, 6-24, 6-18, 7-18, 8-18 atoms, 7-17, 8-17, 6-16, 7-16, or 8-16 atoms.

[0526] A cleavable linking group is one which is sufficiently stable outside the cell, but which upon entry into a target cell is cleaved to release the two parts the linker is holding together. In another embodiment, the cleavable linking group is cleaved at least about 10 times, 20, times, 30 times, 40 times, 50 times, 60 times, 70 times, 80 times, 90 times or more, or at least about 100 times faster in a target cell or under a first reference condition (which can, e.g., be selected to mimic or represent intracellular conditions) than in the blood of a subject, or under a second reference condition (which can, e.g., be selected to mimic or represent conditions found in the blood or serum).

[0527] Cleavable linking groups are susceptible to cleavage agents, e.g., pH, redox potential or the presence of degradative molecules. Generally, cleavage agents are more prevalent or found at higher levels or activities inside cells than in serum or blood. Examples of such degradative agents include: redox agents which are selected for particular substrates or which have no substrate specificity, including, e.g., oxidative or reductive enzymes or reductive agents such as mercaptans, present in cells, that can degrade a redox cleavable linking group by reduction; esterases; endosomes or agents that can create an acidic environment, e.g., those that result in a pH of five or lower; enzymes that can hydrolyze or degrade an acid cleavable linking group by acting as a general acid, peptidases (which can be substrate specific), and phosphatases.

[0528] A cleavable linkage group, such as a disulfide bond can be susceptible to pH. The pH of human serum is 7.4, while the average intracellular pH is slightly lower, ranging from about 7.1-7.3. Endosomes have a more acidic pH, in the range of 5.5-6.0, and lysosomes have an even more acidic pH at around 5.0. Some linkers will have a cleavable linking group that is cleaved at a selected pH, thereby releasing a cationic lipid from the ligand inside the cell, or into the desired compartment of the cell.

[0529] A linker can include a cleavable linking group that is cleavable by a particular enzyme. The type of cleavable linking group incorporated into a linker can depend on the cell to be targeted. For example, a liver-targeting ligand can be linked to a cationic lipid through a linker that includes an ester group. Liver cells are rich in esterases, and therefore the linker will be cleaved more efficiently in liver cells than in cell types that are not esterase-rich. Other cell-types rich in esterases include cells of the lung, renal cortex, and testis.

[0530] Linkers that contain peptide bonds can be used when targeting cell types rich in peptidases, such as liver cells and synoviocytes.

[0531] In general, the suitability of a candidate cleavable linking group can be evaluated by testing the ability of a degradative agent (or condition) to cleave the candidate linking group. It will also be desirable to also test the candidate cleavable linking group for the ability to resist cleavage in the blood or when in contact with other non-target tissue. Thus, one can determine the relative susceptibility to cleavage between a first and a second condition, where the first is selected to be indicative of cleavage in a target cell and the second is selected to be indicative of cleavage in other tissues or biological fluids, e.g., blood or serum. The evaluations can be carried out in cell free systems, in cells, in cell culture, in organ or tissue culture, or in whole animals. It can be useful to make initial evaluations in cell-free or culture conditions and to confirm by further evaluations in whole animals. In certain embodiments, useful candidate compounds are cleaved at least about 2, 4, 10, 20, 30, 40, 50, 60, 70, 80, 90, or about 100 times faster in the cell (or under in vitro conditions selected to mimic intracellular conditions) as compared to blood or serum (or under in vitro conditions selected to mimic extracellular conditions).

[0532] i. Redox Cleavable Linking Groups

[0533] In certain embodiments, a cleavable linking group is a redox cleavable linking group that is cleaved upon reduction or oxidation. An example of reductively cleavable linking group is a disulphide linking group (—S—S—). To determine if a candidate cleavable linking group is a suitable “reductively cleavable linking group,” or for example is suitable for use with a particular iRNA moiety and particular targeting agent one can look to methods described herein. For example, a candidate can be evaluated by incubation with dithiothreitol (DTT), or other reducing agent using reagents know in the art, which mimic the rate of cleavage which would be observed in a cell, e.g., a target cell. The candidates can also be evaluated under conditions which are selected to mimic blood or serum conditions. In one, candidate compounds are cleaved by at most about 10% in the blood. In other embodiments, useful candidate compounds are degraded at least about 2, 4, 10, 20, 30, 40, 50, 60, 70, 80, 90, or about 100 times faster in the cell (or under in vitro conditions selected to mimic intracellular conditions) as compared to blood (or under in vitro conditions selected to mimic extracellular conditions). The rate of cleavage of candidate compounds can be determined using standard enzyme kinetics assays under conditions chosen to mimic intracellular media and compared to conditions chosen to mimic extracellular media.

[0534] ii. Phosphate-Based Cleavable Linking Groups

[0535] In certain embodiments, a cleavable linker comprises a phosphate-based cleavable linking group. A phosphate-based cleavable linking group is cleaved by agents that degrade or hydrolyze the phosphate group. An example of an agent that cleaves phosphate groups in cells are enzymes such as phosphatases in cells. Examples of phosphate-based linking groups are —O—P(O)(ORk)-O—, —O—P(S)(ORk)-O—, —O—P(S)(SRk)-O—, —S—P(O)(ORk)-O—, —O—P(O)(ORk)-S—, —S—P(O)(ORk)-S—, —O—P(S)(ORk)-S—, —S—P(S)(ORk)-O—, —O—P(O)(Rk)-O—, —O—P(S)(Rk)-O—, —S—P(O)(Rk)-O—, —S—P(S)(Rk)-O—, —S—P(O)(Rk)-S—, —O—P(S)(Rk)-S—, wherein Rk at each occurrence can be, independently, C1-C20 alkyl, C1-C20 haloalkyl, C6-C10 aryl, or C7-C12 aralkyl. Exemplary embodiments include —O—P(O)(OH)—O—, —O—P(S)(OH)—O—, —O—P(S)(SH)—O—, —S—P(O)(OH)—O—, —O—P(O)(OH)—S—, —S—P(O)(OH)—S—, —O—P(S)(OH)—S—, —S—P(S)(OH)—O—, —O—P(O)(H)—O—, —O—P(S)(H)—O—, —S—P(O)(H)—O, —S—P(S)(H)—O—, —S—P(O)(H)—S—, and —O—P(S)(H)—S—. In certain embodiments a phosphate-based linking group is —O—P(O)(OH)—O—. These candidates can be evaluated using methods analogous to those described above.

[0536] iii. Acid Cleavable Linking Groups

[0537] In certain embodiments, a cleavable linker comprises an acid cleavable linking group. An acid cleavable linking group is a linking group that is cleaved under acidic conditions. In other embodiments, acid cleavable linking groups are cleaved in an acidic environment with a pH of about 6.5 or lower (e.g., about 6.0, 5.75, 5.5, 5.25, 5.0, or lower), or by agents such as enzymes that can act as a general acid. In a cell, specific low pH organelles, such as endosomes and lysosomes can provide a cleaving environment for acid cleavable linking groups. Examples of acid cleavable linking groups include but are not limited to hydrazones, esters, and esters of amino acids. Acid cleavable groups can have the general formula —C═NN—, C(O)O, or —OC(O). An exemplary embodiment is when the carbon attached to the oxygen of the ester (the alkoxy group) is an aryl group, substituted alkyl group, or tertiary alkyl group such as dimethyl pentyl or t-butyl. These candidates can be evaluated using methods analogous to those described above.

[0538] iv. Ester-Based Cleavable Linking Groups

[0539] In certain embodiments, a cleavable linker comprises an ester-based cleavable linking group. An ester-based cleavable linking group is cleaved by enzymes such as esterases and amidases in cells. Examples of ester-based cleavable linking groups include but are not limited to esters of alkylene, alkenylene and alkynylene groups. Ester cleavable linking groups have the general formula —C(O)O—, or —OC(O)—. These candidates can be evaluated using methods analogous to those described above.

[0540] v. Peptide-Based Cleavable Linking Groups

[0541] In yet another embodiment, a cleavable linker comprises a peptide-based cleavable linking group. A peptide-based cleavable linking group is cleaved by enzymes such as peptidases and proteases in cells. Peptide-based cleavable linking groups are peptide bonds formed between amino acids to yield oligopeptides (e.g., dipeptides, tripeptides etc.) and polypeptides. Peptide-based cleavable groups do not include the amide group (—C(O)NH—). The amide group can be formed between any alkylene, alkenylene or alkynelene. A peptide bond is a special type of amide bond formed between amino acids to yield peptides and proteins. The peptide based cleavage group is generally limited to the peptide bond (i.e., the amide bond) formed between amino acids yielding peptides and proteins and does not include the entire amide functional group. Peptide-based cleavable linking groups have the general formula —NHCHRAC(O)NHCHRBC(O)—, where RA and RB are the R groups of the two adjacent amino acids. These candidates can be evaluated using methods analogous to those described above.

[0542] In some embodiments, an iRNA of the invention is conjugated to a carbohydrate through a linker. Non-limiting examples of iRNA carbohydrate conjugates with linkers of the compositions and methods of the invention include, but are not limited to,

[chemical structure]

[chemical structure]

[chemical structure]

when one of X or Y is an oligonucleotide, the other is a hydrogen.

[0543] In certain embodiments of the compositions and methods of the invention, a ligand is one or more “GalNAc” (N-acetylgalactosamine) derivatives attached through a bivalent or trivalent branched linker.

[0544] In certain embodiments, a dsRNA of the invention is conjugated to a bivalent or trivalent branched linker selected from the group of structures shown in any of formula (XLV)-(XLVI):

[chemical structure]

[0545] wherein:
[0546] q2A, q2B, q3A, q3B, q4A, q4B, q5A, q5B and q5C represent independently for each occurrence 0-20 and wherein the repeating unit can be the same or different;
[0547] P^{2A}, P^{2B}, P^{3A}, P^{3B}, P^{4A}, P^{4B}, P^{5A}, P^{5B}, P^{5C}, T^{2A}, T^{2B}, T^{3A}, T^{3B}, T^{4A}, T^{4B}, T^{4A}, T^{5B}, T^{5C} are each independently for each occurrence absent, CO, NH, O, S, OC(O), NHC(O), CH₂, CH₂NH or CH₂O;
[0548] Q^{2A}, Q^{2B}, Q^{3A}, Q^{3B}, Q^{4A}, Q^{4B}, Q^{5A} Q^{5B}, Q^{5C} are independently for each occurrence absent, alkylene, substituted alkylene wherein one or more methylenes can be interrupted or terminated by one or more of O, S, S(O), SO₂, N(R^{N}), C(R′)═C(R″), C≡C or C(O);
[0549] R^{2A}, R^{2B}, R^{3A}, R^{3B}, R^{4A}, R^{4B}, R^{5A}, R^{5B}, R^{5C} are each independently for each occurrence absent, NH, O, S, CH₂, C(O)O, C(O)NH, NHCH(R^{a})C(O), C(O)CH(R^{a})—NH— CO, CH═N—O,

[chemical structure]

or heterocyclyl;
[0550] L^{2A}, L^{2B}, L^{3A}, L^{3B}, L^{4A}, L^{4B} L^{5A} L^{5B} and L^{5C} represent the ligand; i.e. each independently for each occurrence a monosaccharide (such as GalNAc), disaccharide, trisaccharide, tetrasaccharide, oligosaccharide, or polysaccharide; and R^{a} is H or amino acid side chain. Trivalent conjugating GalNAc derivatives are particularly useful for use with RNAi agents for inhibiting the expression of a target gene, such as those of formula (XLIX):

[chemical structure]

[0551] wherein L^{5A}, L^{5B} and L^{5C} represent a monosaccharide, such as GalNAc derivative.

[0552] Examples of suitable bivalent and trivalent branched linker groups conjugating GalNAc derivatives include, but are not limited to, the structures recited above as formulas II, VII, XI, X, and XIII.

[0553] Representative U.S. Patents that teach the preparation of RNA conjugates include, but are not limited to, U.S. Pat. Nos. 4,828,979; 4,948,882; 5,218,105; 5,525,465; 5,541,313; 5,545,730; 5,552,538; 5,578,717, 5,580,731; 5,591,584; 5,109,124; 5,118,802; 5,138,045; 5,414,077; 5,486,603; 5,512,439; 5,578,718; 5,608,046; 4,587,044; 4,605,735; 4,667,025; 4,762,779; 4,789,737; 4,824,941; 4,835,263; 4,876,335; 4,904,582; 4,958,013; 5,082,830; 5,112,963; 5,214,136; 5,082,830; 5,112,963; 5,214,136; 5,245,022; 5,254,469; 5,258,506; 5,262,536; 5,272,250; 5,292,873; 5,317,098; 5,371,241, 5,391,723; 5,416,203, 5,451,463; 5,510,475; 5,512,667; 5,514,785; 5,565,552; 5,567,810; 5,574,142; 5,585,481; 5,587,371; 5,595,726; 5,597,696; 5,599,923; 5,599,928; 5,688,941; 6,294,664; 6,320,017; 6,576,752; 6,783,931; 6,900,297; 7,037,646; and 8,106,022, the entire contents of each of which are hereby incorporated herein by reference.

[0554] It is not necessary for all positions in a given compound to be uniformly modified, and in fact more than one of the aforementioned modifications can be incorporated in a single compound or even at a single nucleoside within an iRNA. The present invention also includes iRNA compounds that are chimeric compounds.

[0555] “Chimeric” iRNA compounds or “chimeras,” in the context of this invention, are iRNA compounds, such as dsRNA agents, that contain two or more chemically distinct regions, each made up of at least one monomer unit, i.e., a nucleotide in the case of a dsRNA compound. These iRNAs typically contain at least one region wherein the RNA is modified so as to confer upon the iRNA increased resistance to nuclease degradation, increased cellular uptake, or increased binding affinity for the target nucleic acid. An additional region of the iRNA can serve as a substrate for enzymes capable of cleaving RNA:DNA or RNA:RNA hybrids. By way of example, RNase H is a cellular endonuclease which cleaves the RNA strand of an RNA:DNA duplex. Activation of RNase H, therefore, results in cleavage of the RNA target, thereby greatly enhancing the efficiency of iRNA inhibition of gene expression. Consequently, comparable results can often be obtained with shorter iRNAs when chimeric dsRNAs are used, compared to phosphorothioate deoxy dsRNAs hybridizing to the same target region. Cleavage of the RNA target can be routinely detected by gel electrophoresis and, if necessary, associated nucleic acid hybridization techniques known in the art.

[0556] In certain instances, the RNA of an iRNA can be modified by a non-ligand group. A number of non-ligand molecules have been conjugated to iRNAs in order to enhance the activity, cellular distribution or cellular uptake of the iRNA, and procedures for performing such conjugations are available in the scientific literature. Such non-ligand moieties have included lipid moieties, such as cholesterol (Kubo, T. et al., Biochem. Biophys. Res. Comm., 2007, 365(1):54-61; Letsinger et al., Proc. Natl. Acad. Sci. USA, 1989, 86:6553), cholic acid (Manoharan et al., Bioorg. Med. Chem. Lett., 1994, 4:1053), a thioether, e.g., hexyl-S-tritylthiol (Manoharan et al., Ann. N.Y. Acad. Sci., 1992, 660:306; Manoharan et al., Bioorg. Med. Chem. Let., 1993, 3:2765), a thiocholesterol (Oberhauser et al., Nucl. Acids Res., 1992, 20:533), an aliphatic chain, e.g., dodecandiol or undecyl residues (Saison-Behmoaras et al., EMBO J., 1991, 10:111; Kabanov et al., FEBS Lett., 1990, 259:327; Svinarchuk et al., Biochimie, 1993, 75:49), a phospholipid, e.g., di-hexadecyl-rac-glycerol or triethylammonium 1,2-di-O-hexadecyl-rac-glycero-3-H-phosphonate (Manoharan et al., Tetrahedron Lett., 1995, 36:3651; Shea et al., Nucl. Acids Res., 1990, 18:3777), a polyamine or a polyethylene glycol chain (Manoharan et al., Nucleosides & Nucleotides, 1995, 14:969), or adamantane acetic acid (Manoharan et al., Tetrahedron Lett., 1995, 36:3651), a palmityl moiety (Mishra et al., Biochim. Biophys. Acta, 1995, 1264:229), or an octadecylamine or hexylamino-carbonyl-oxycholesterol moiety (Crooke et al., J. Pharmacol. Exp. Ther., 1996, 277:923). Representative United States patents that teach the preparation of such RNA conjugates have been listed above. Typical conjugation protocols involve the synthesis of RNAs bearing an aminolinker at one or more positions of the sequence. The amino group is then reacted with the molecule being conjugated using appropriate coupling or activating reagents. The conjugation reaction can be performed either with the RNA still bound to the solid support or following cleavage of the RNA, in solution phase. Purification of the RNA conjugate by HPLC typically affords the pure conjugate.

### V. Delivery of an RNAi Agent of the Disclosure

[0557] The delivery of a RNAi agent of the disclosure to a cell e.g., a cell within a subject, such as a human subject (e.g., a subject in need thereof, such as a subject having a PRNP-associated disorder, e.g., a prion disease, such as a genetic prion disease, e.g., familial Creutzfeldt-Jakob disease (CJD), Gerstmann-Straussler-Scheinker syndrome (GSS), and fatal familial insomnia (FFI), can be achieved in a number of different ways. For example, delivery may be performed by contacting a cell with an RNAi agent of the disclosure either in vitro or in vivo. In vivo delivery may also be performed directly by administering a composition comprising an RNAi agent, e.g., a dsRNA, to a subject. Alternatively, in vivo delivery may be performed indirectly by administering one or more vectors that encode and direct the expression of the RNAi agent. These alternatives are discussed further below.

[0558] In general, any method of delivering a nucleic acid molecule (in vitro or in vivo) can be adapted for use with a RNAi agent of the disclosure (see e.g., Akhtar S. and Julian RL., (1992) Trends Cell. Biol. 2(5):139-144 and WO94/02595, which are incorporated herein by reference in their entireties). For in vivo delivery, factors to consider in order to deliver an RNAi agent include, for example, biological stability of the delivered agent, prevention of non-specific effects, and accumulation of the delivered agent in the target tissue. The non-specific effects of an RNAi agent can be minimized by local administration, for example, by direct injection or implantation into a tissue or topically administering the preparation. Local administration to a treatment site maximizes local concentration of the agent, limits the exposure of the agent to systemic tissues that can otherwise be harmed by the agent or that can degrade the agent, and permits a lower total dose of the RNAi agent to be administered. Several studies have shown successful knockdown of gene products when an RNAi agent is administered locally. For example, intraocular delivery of a VEGF dsRNA by intravitreal injection in cynomolgus monkeys (Tolentino, M J. et al., (2004) Retina 24:132-138) and subretinal injections in mice (Reich, S J. et al. (2003) Mol. Vis. 9:210-216) were both shown to prevent neovascularization in an experimental model of age-related macular degeneration. In addition, direct intratumoral injection of a dsRNA in mice reduces tumor volume (Pille, J. et al. (2005) Mol. Ther. 11:267-274) and can prolong survival of tumor-bearing mice (Kim, W J. et al., (2006) Mol. Ther. 14:343-350; Li, S. et al., (2007) Mol. Ther. 15:515-523). RNA interference has also shown success with local delivery to the CNS by direct injection (Dorn, G. et al., (2004) Nucleic Acids 32:e49; Tan, P H. et al. (2005) Gene Ther. 12:59-66; Makimura, H. et a.l (2002) BMC Neurosci. 3:18; Shishkina, G T., et al. (2004) Neuroscience 129:521-528; Thakker, E R., et al. (2004) Proc. Natl. Acad. Sci. U.S.A. 101:17270-17275; Akaneya, Y., et al. (2005) J. Neurophysiol. 93:594-602) and to the lungs by intranasal administration (Howard, K A. et al., (2006) Mol. Ther. 14:476-484; Zhang, X. et al., (2004) J. Biol. Chem. 279:10677-10684; Bitko, V. et al., (2005) Nat. Med. 11:50-55). For administering a RNAi agent systemically for the treatment of a disease, the RNA can be modified or alternatively delivered using a drug delivery system; both methods act to prevent the rapid degradation of the dsRNA by endo- and exo-nucleases in vivo. Modification of the RNA or the pharmaceutical carrier can also permit targeting of the RNAi agent to the target tissue and avoid undesirable off-target effects (e.g., without wishing to be bound by theory, use of GNAs as described herein has been identified to destabilize the seed region of a dsRNA, resulting in enhanced preference of such dsRNAs for on-target effectiveness, relative to off-target effects, as such off-target effects are significantly weakened by such seed region destabilization). RNAi agents can be modified by chemical conjugation to lipophilic groups such as cholesterol to enhance cellular uptake and prevent degradation. For example, a RNAi agent directed against ApoB conjugated to a lipophilic cholesterol moiety was injected systemically into mice and resulted in knockdown of apoB mRNA in both the liver and jejunum (Soutschek, J. et al., (2004) Nature 432:173-178). Conjugation of an RNAi agent to an aptamer has been shown to inhibit tumor growth and mediate tumor regression in a mouse model of prostate cancer (McNamara, J O. et al., (2006) Nat. Biotechnol. 24:1005-1015). In an alternative embodiment, the RNAi agent can be delivered using drug delivery systems such as a nanoparticle, a dendrimer, a polymer, liposomes, or a cationic delivery system. Positively charged cationic delivery systems facilitate binding of molecule RNAi agent (negatively charged) and also enhance interactions at the negatively charged cell membrane to permit efficient uptake of an RNAi agent by the cell. Cationic lipids, dendrimers, or polymers can either be bound to an RNAi agent, or induced to form a vesicle or micelle (see e.g., Kim SH. et al., (2008) Journal of Controlled Release 129(2):107-116) that encases an RNAi agent. The formation of vesicles or micelles further prevents degradation of the RNAi agent when administered systemically. Methods for making and administering cationic-RNAi agent complexes are well within the abilities of one skilled in the art (see e.g., Sorensen, D R., et al. (2003) J. Mol. Biol 327:761-766; Verma, U N. et al., (2003) Clin. Cancer Res. 9:1291-1300; Arnold, A S et al. (2007) J. Hypertens. 25:197-205, which are incorporated herein by reference in their entirety). Some non-limiting examples of drug delivery systems useful for systemic delivery of RNAi agents include DOTAP (Sorensen, D R., et al (2003), supra; Verma, U N. et al., (2003), supra), Oligofectamine, “solid nucleic acid lipid particles” (Zimmermann, T S. et al., (2006) Nature 441:111-114), cardiolipin (Chien, P Y. et al., (2005) Cancer Gene Ther. 12:321-328; Pal, A. et al., (2005) Int J. Oncol. 26:1087-1091), polyethyleneimine (Bonnet ME. et al., (2008) Pharm. Res. August 16 Epub ahead of print; Aigner, A. (2006) J. Biomed. Biotechnol. 71659), Arg-Gly-Asp (RGD) peptides (Liu, S. (2006) Mol. Pharm. 3:472-487), and polyamidoamines (Tomalia, D A. et al., (2007) Biochem. Soc. Trans. 35:61-67; Yoo, H. et al., (1999) Pharm. Res. 16:1799-1804). In some embodiments, a RNAi agent forms a complex with cyclodextrin for systemic administration. Methods for administration and pharmaceutical compositions of RNAi agents and cyclodextrins can be found in U.S. Patent No. 7, 427, 605, which is herein incorporated by reference in its entirety.

[0559] Certain aspects of the instant disclosure relate to a method of reducing the expression of a PRNP target gene in a cell, comprising contacting said cell with the double-stranded RNAi agent of the disclosure. In one embodiment, the cell is a hepatic cell, optionally a hepatocyte. In one embodiment, the cell is an extrahepatic cell, optionally a CNS cell, e.g., a neuron or a glial cell.

[0560] Another aspect of the disclosure relates to a method of reducing the expression of a PRNP target gene in a subject, comprising administering to the subject the double-stranded RNAi agent of the disclosure.

[0561] Another aspect of the disclosure relates to a method of treating a subject having a PRNP-associated disorder, comprising administering to the subject a therapeutically effective amount of the double-stranded RNAi agent of the disclosure, thereby treating the subject. Exemplary PRNP-associated disorders that can be treated by the method of the disclosure include prion diseases, such as a genetic prion disease, e.g., familial Creutzfeldt-Jakob disease (CJD), Gerstmann-Straussler-Scheinker syndrome (GSS), and fatal familial insomnia (FFI); a sporadic prion disease, e.g., sporadic Creutzfeldt-Jakob disease, Sporadic Fatal Insomnia (sFI), and Variably Proteinase-Sensitive Prionopathy (VPSPr), or an acquired prion disease, e.g., Iatrogenic CJD (iCJD), Kuru, and Variant CJD (vCJD).

[0562] In one embodiment, the double-stranded RNAi agent is administered subcutaneously.

[0563] In one embodiment, the double-stranded RNAi agent is administered by intraventricular administration.

[0564] In one embodiment, the double-stranded RNAi agent is administered intrathecally. By intrathecal administration of the double-stranded RNAi agent, the method can reduce the expression of a PRNP target gene in a brain or spine tissue, for instance, cortex, cerebellum, striatum, cervical spine, lumbar spine, and thoracic spine.

[0565] For ease of exposition the formulations, compositions and methods in this section are discussed largely with regard to modified siRNA compounds. It may be understood, however, that these formulations, compositions and methods can be practiced with other siRNA compounds, e.g., unmodified siRNA compounds, and such practice is within the disclosure. A composition that includes a RNAi agent can be delivered to a subject by a variety of routes. Exemplary routes include intrathecal, intravenous, intraventricular, topical, rectal, anal, vaginal, nasal, pulmonary, and ocular.

[0566] The RNAi agents of the disclosure can be incorporated into pharmaceutical compositions suitable for administration. Such compositions typically include one or more species of RNAi agent and a pharmaceutically acceptable carrier. As used herein the language “pharmaceutically acceptable carrier” is intended to include any and all solvents, dispersion media, coatings, antibacterial and antifungal agents, isotonic and absorption delaying agents, and the like, compatible with pharmaceutical administration. The use of such media and agents for pharmaceutically active substances is well known in the art. Except insofar as any conventional media or agent is incompatible with the active compound, use thereof in the compositions is contemplated. Supplementary active compounds can also be incorporated into the compositions.

[0567] The pharmaceutical compositions of the present disclosure may be administered in a number of ways depending upon whether local or systemic treatment is desired and upon the area to be treated. Administration may be topical (including ophthalmic, vaginal, rectal, intranasal, transdermal), oral, or parenteral. Parenteral administration includes intravenous drip, subcutaneous, intraperitoneal, or intramuscular injection, or intrathecal or intraventricular administration.

[0568] The route and site of administration may be chosen to enhance targeting. For example, to target muscle cells, intramuscular injection into the muscles of interest would be a logical choice. Lung cells might be targeted by administering the RNAi agent in aerosol form. The vascular endothelial cells could be targeted by coating a balloon catheter with the RNAi agent and mechanically introducing the RNA.

[0569] Formulations for topical administration may include transdermal patches, ointments, lotions, creams, gels, drops, suppositories, sprays, liquids, and powders. Conventional pharmaceutical carriers, aqueous, powder or oily bases, thickeners and the like may be necessary or desirable. Coated condoms, gloves, and the like may also be useful.

[0570] Compositions for oral administration include powders or granules, suspensions or solutions in water, syrups, elixirs or non-aqueous media, tablets, capsules, lozenges, or troches. In the case of tablets, carriers that can be used include lactose, sodium citrate and salts of phosphoric acid. Various disintegrants such as starch, and lubricating agents such as magnesium stearate, sodium lauryl sulfate and talc, are commonly used in tablets. For oral administration in capsule form, useful diluents are lactose and high molecular weight polyethylene glycols. When aqueous suspensions are required for oral use, the nucleic acid compositions can be combined with emulsifying and suspending agents. If desired, certain sweetening or flavoring agents can be added.

[0571] Compositions for intrathecal or intraventricular administration may include sterile aqueous solutions which may also contain buffers, diluents, and other suitable additives.

[0572] Formulations for parenteral administration may include sterile aqueous solutions which may also contain buffers, diluents, and other suitable additives. Intraventricular injection may be facilitated by an intraventricular catheter, for example, attached to a reservoir. For intravenous use, the total concentration of solutes may be controlled to render the preparation isotonic.

[0573] In one embodiment, the administration of the siRNA compound, e.g., a double-stranded siRNA compound, or ssiRNA compound, composition is parenteral, e.g., intravenous (e.g., as a bolus or as a diffusible infusion), intradermal, intraperitoneal, intramuscular, intrathecal, intraventricular, intracranial, subcutaneous, transmucosal, buccal, sublingual, endoscopic, rectal, oral, vaginal, topical, pulmonary, intranasal, urethral, or ocular. Administration can be provided by the subject or by another person, e.g., a health care provider. The medication can be provided in measured doses or in a dispenser which delivers a metered dose. Selected modes of delivery are discussed in more detail below.

[0574] Intrathecal Administration.

[0575] In one embodiment, the double-stranded RNAi agent is delivered by intrathecal injection (i.e., injection into the spinal fluid which bathes the brain and spinal cord tissue). Intrathecal injection of RNAi agents into the spinal fluid can be performed as a bolus injection or via minipumps which can be implanted beneath the skin, providing a regular and constant delivery of siRNA into the spinal fluid. The circulation of the spinal fluid from the choroid plexus, where it is produced, down around the spinal cord and dorsal root ganglia and subsequently up past the cerebellum and over the cortex to the arachnoid granulations, where the fluid can exit the CNS, that, depending upon size, stability, and solubility of the compounds injected, molecules delivered intrathecally could hit targets throughout the entire CNS.

[0576] In some embodiments, the intrathecal administration is via a pump. The pump may be a surgically implanted osmotic pump. In one embodiment, the osmotic pump is implanted into the subarachnoid space of the spinal canal to facilitate intrathecal administration.

[0577] In some embodiments, the intrathecal administration is via an intrathecal delivery system for a pharmaceutical including a reservoir containing a volume of the pharmaceutical agent, and a pump configured to deliver a portion of the pharmaceutical agent contained in the reservoir. More details about this intrathecal delivery system may be found in WO 2015/116658, which is incorporated by reference in its entirety.

[0578] The amount of intrathecally injected RNAi agents may vary from one target gene to another target gene and the appropriate amount that has to be applied may have to be determined individually for each target gene. Typically, this amount ranges from 10 μg to 2 mg, or 50 μg to 1500 μg, or 100 μg to 1000 μg.

[0579] Vector Encoded RNAi Agents of the Disclosure

[0580] RNAi agents targeting the PRNP gene can be expressed from transcription units inserted into DNA or RNA vectors (see, e.g., Couture, A, et al., TIG. (1996), 12:5-10; WO 00/22113, WO 00/22114, and U.S. Pat. No. 6,054,299). Expression can be sustained (months or longer), depending upon the specific construct used and the target tissue or cell type. These transgenes can be introduced as a linear construct, a circular plasmid, or a viral vector, which can be an integrating or non-integrating vector. The transgene can also be constructed to permit it to be inherited as an extrachromosomal plasmid (Gassmann, et al., (1995) Proc. Natd. Acad. Sci. USA 92:1292).

[0581] The individual strand or strands of a RNAi agent can be transcribed from a promoter on an expression vector. Where two separate strands are to be expressed to generate, for example, a dsRNA, two separate expression vectors can be co-introduced (e.g., by transfection or infection) into a target cell. Alternatively, each individual strand of a dsRNA can be transcribed by promoters both of which are located on the same expression plasmid. In one embodiment, a dsRNA is expressed as inverted repeat polynucleotides joined by a linker polynucleotide sequence such that the dsRNA has a stem and loop structure.

[0582] RNAi agent expression vectors are generally DNA plasmids or viral vectors. Expression vectors compatible with eukaryotic cells, such as those compatible with vertebrate cells, can be used to produce recombinant constructs for the expression of a RNAi agent as described herein. Delivery of RNAi agent expressing vectors can be systemic, such as by intravenous or intramuscular administration, by administration to target cells ex-planted from the patient followed by reintroduction into the patient, or by any other means that allows for introduction into a desired target cell.

[0583] Viral vector systems which can be utilized with the methods and compositions described herein include, but are not limited to, (a) adenovirus vectors; (b) retrovirus vectors, including but not limited to lentiviral vectors, moloney murine leukemia virus, etc.; (c) adeno-associated virus vectors; (d) herpes simplex virus vectors; (e) SV 40 vectors; (f) polyoma virus vectors; (g) papilloma virus vectors; (h) picornavirus vectors; (i) pox virus vectors such as an orthopox, e.g., vaccinia virus vectors or avipox, e.g. canary pox or fowl pox; and (j) a helper-dependent or gutless adenovirus. Replication-defective viruses can also be advantageous. Different vectors will or will not become incorporated into the cells' genome. The constructs can include viral sequences for transfection, if desired. Alternatively, the construct can be incorporated into vectors capable of episomal replication, e.g. EPV and EBV vectors. Constructs for the recombinant expression of a RNAi agent will generally require regulatory elements, e.g., promoters, enhancers, etc., to ensure the expression of the RNAi agent in target cells. Other aspects to consider for vectors and constructs are known in the art.

### VI. Pharmaceutical Compositions of the Invention

[0584] The present disclosure also includes pharmaceutical compositions and formulations which include the RNAi agents of the disclosure. In one embodiment, provided herein are pharmaceutical compositions containing an RNAi agent, as described herein, and a pharmaceutically acceptable carrier. The pharmaceutical compositions containing the RNAi agent are useful for treating a disease or disorder associated with the expression or activity of PRNP, e.g., a PRNP-associated disease, such as prion diseases, e.g., a genetic prion disease, e.g., familial Creutzfeldt-Jakob disease (CJD), Gerstmann-Sträussler-Scheinker syndrome (GSS), and fatal familial insomnia (FFI); a sporadic prion disease, e.g., sporadic Creutzfeldt-Jakob disease, Sporadic Fatal Insomnia (sFI), and Variably Proteinase-Sensitive Prionopathy (VPSPr), or an acquired prion disease, e.g., Iatrogenic CJD (iCJD), Kuru, and Variant CJD (vCJD).

[0585] Such pharmaceutical compositions are formulated based on the mode of delivery. One example is compositions that are formulated for systemic administration via parenteral delivery, e.g., by intravenous (IV), intramuscular (IM), or for subcutaneous (subQ) delivery. Another example is compositions that are formulated for direct delivery into the central nervous system, e.g., by intrathecal or intraventricular routes of injection, optionally by infusion into the brain (e.g., striatum), such as by continuous pump infusion.

[0586] In some embodiments, the pharmaceutical compositions of the invention are pyrogen free or non-pyrogenic.

[0587] The pharmaceutical compositions of the disclosure may be administered in dosages sufficient to inhibit expression of a PRNP gene. In general, a suitable dose of an RNAi agent of the disclosure will be a flat dose in the range of about 0.001 to about 200.0 mgabout once per month to about once per year, typically about once per quarter (i.e., about once every three months) to about once per year, generally a flat dose in the range of about 1 to 50 mg about once per month to about once per year, typically about once per quarter to about once per year.

[0588] After an initial treatment regimen (e.g., loading dose), the treatments can be administered on a less frequent basis.

[0589] The skilled artisan will appreciate that certain factors can influence the dosage and timing required to effectively treat a subject, including but not limited to the severity of the disease or disorder, previous treatments, the general health or age of the subject, and other diseases present. Moreover, treatment of a subject with a therapeutically effective amount of a composition can include a single treatment or a series of treatments.

[0590] Advances in mouse genetics have generated a number of mouse models for the study of various PRNP-associated diseases that would benefit from reduction in the expression of PRNP. Such models can be used for in vivo testing of RNAi agents, as well as for determining a therapeutically effective dose. Suitable mouse models are known in the art and include, for example, the mouse models described elsewhere herein.

[0591] The pharmaceutical compositions of the present disclosure can be administered in a number of ways depending upon whether local or systemic treatment is desired and upon the area to be treated. Administration can be topical (e.g., by a transdermal patch), pulmonary, e.g., by inhalation or insufflation of powders or aerosols, including by nebulizer; intratracheal, intranasal, epidermal and transdermal, oral or parenteral. Parenteral administration includes intravenous, intraarterial, subcutaneous, intraperitoneal or intramuscular injection or infusion; subdermal, e.g., via an implanted device; or intracranial, e.g., by intraparenchymal, intrathecal or intraventricular, administration.

[0592] The RNAi agents can be delivered in a manner to target a particular tissue, such as the liver, the CNS (e.g., neuronal, glial or vascular tissue of the brain), or both the liver and CNS.

[0593] Pharmaceutical compositions and formulations for topical administration can include transdermal patches, ointments, lotions, creams, gels, drops, suppositories, sprays, liquids and powders. Conventional pharmaceutical carriers, aqueous, powder or oily bases, thickeners and the like can be necessary or desirable. Coated condoms, gloves and the like can also be useful. Suitable topical formulations include those in which the RNAi agents featured in the disclosure are in admixture with a topical delivery agent such as lipids, liposomes, fatty acids, fatty acid esters, steroids, chelating agents and surfactants. Suitable lipids and liposomes include neutral (e.g., dioleoylphosphatidyl DOPE ethanolamine, dimyristoylphosphatidyl choline DMPC, distearolyphosphatidyl choline) negative (e.g., dimyristoylphosphatidyl glycerol DMPG) and cationic (e.g., dioleoyltetramethylaminopropyl DOTAP and dioleoylphosphatidyl ethanolamine DOTMA). RNAi agents featured in the disclosure can be encapsulated within liposomes or can form complexes thereto, in particular to cationic liposomes. Alternatively, RNAi agents can be complexed to lipids, in particular to cationic lipids. Suitable fatty acids and esters include but are not limited to arachidonic acid, oleic acid, eicosanoic acid, lauric acid, caprylic acid, capric acid, myristic acid, palmitic acid, stearic acid, linoleic acid, linolenic acid, dicaprate, tricaprate, monoolein, dilaurin, glyceryl 1-monocaprate, 1-dodecylazacycloheptan-2-one, an acylcarnitine, an acylcholine, or a C₁₋₂₀ alkyl ester (e.g., isopropylmyristate IPM), monoglyceride, diglyceride or pharmaceutically acceptable salt thereof. Topical formulations are described in detail in U.S. Pat. No. 6,747,014, which is incorporated herein by reference.

[0594] A. RNAi Agent Formulations Comprising Membranous Molecular Assemblies

[0595] A RNAi agent for use in the compositions and methods of the disclosure can be formulated for delivery in a membranous molecular assembly, e.g., a liposome or a micelle. As used herein, the term “liposome” refers to a vesicle composed of amphiphilic lipids arranged in at least one bilayer, e.g., one bilayer or a plurality of bilayers. Liposomes include unilamellar and multilamellar vesicles that have a membrane formed from a lipophilic material and an aqueous interior. The aqueous portion contains the RNAi agent composition. The lipophilic material isolates the aqueous interior from an aqueous exterior, which typically does not include the RNAi agent composition, although in some examples, it may. Liposomes are useful for the transfer and delivery of active ingredients to the site of action. Because the liposomal membrane is structurally similar to biological membranes, when liposomes are applied to a tissue, the liposomal bilayer fuses with bilayer of the cellular membranes. As the merging of the liposome and cell progresses, the internal aqueous contents that include the RNAi agent are delivered into the cell where the RNAi agent can specifically bind to a target RNA and can mediate RNAi. In some cases the liposomes are also specifically targeted, e.g., to direct the RNAi agent to particular cell types.

[0596] A liposome containing an RNAi agent can be prepared by a variety of methods. In one example, the lipid component of a liposome is dissolved in a detergent so that micelles are formed with the lipid component. For example, the lipid component can be an amphipathic cationic lipid or lipid conjugate. The detergent can have a high critical micelle concentration and may be nonionic. Exemplary detergents include cholate, CHAPS, octylglucoside, deoxycholate, and lauroyl sarcosine. The RNAi agent preparation is then added to the micelles that include the lipid component. The cationic groups on the lipid interact with the RNAi agent and condense around the RNAi agent to form a liposome. After condensation, the detergent is removed, e.g., by dialysis, to yield a liposomal preparation of RNAi agent.

[0597] If necessary a carrier compound that assists in condensation can be added during the condensation reaction, e.g., by controlled addition. For example, the carrier compound can be a polymer other than a nucleic acid (e.g., spermine or spermidine). pH can also adjusted to favor condensation.

[0598] Methods for producing stable polynucleotide delivery vehicles, which incorporate a polynucleotide/cationic lipid complex as structural components of the delivery vehicle, are further described in, e.g., WO 96/37194, the entire contents of which are incorporated herein by reference. Liposome formation can also include one or more aspects of exemplary methods described in Felgner, P. L. et al., (1987) Proc. Natl. Acad. Sci. USA 8:7413-7417; U.S. Pat. Nos. 4,897,355; 5,171,678; Bangham et al., (1965) M. Mol. Biol. 23:238; Olson et al., (1979) Biochim. Biophys. Acta 557:9; Szoka et al., (1978) Proc. Natl. Acad. Sci. 75: 4194; Mayhew et al., (1984) Biochim. Biophys. Acta 775:169; Kim et al., (1983) Biochim. Biophys. Acta 728:339; and Fukunaga et al., (1984) Endocrinol. 115:757. Commonly used techniques for preparing lipid aggregates of appropriate size for use as delivery vehicles include sonication and freeze-thaw plus extrusion (see, e.g., Mayer et al., (1986) Biochim. Biophys. Acta 858:161. Microfluidization can be used when consistently small (50 to 200 nm) and relatively uniform aggregates are desired (Mayhew et al., (1984) Biochim. Biophys. Acta 775:169. These methods are readily adapted to packaging RNAi agent preparations into liposomes.

[0599] Liposomes fall into two broad classes. Cationic liposomes are positively charged liposomes which interact with the negatively charged nucleic acid molecules to form a stable complex. The positively charged nucleic acid/liposome complex binds to the negatively charged cell surface and is internalized in an endosome. Due to the acidic pH within the endosome, the liposomes are ruptured, releasing their contents into the cell cytoplasm (Wang et al. (1987) Biochem. Biophys. Res. Commun., 147:980-985).

[0600] Liposomes, which are pH-sensitive or negatively charged, entrap nucleic acids rather than complex with them. Since both the nucleic acid and the lipid are similarly charged, repulsion rather than complex formation occurs. Nevertheless, some nucleic acid is entrapped within the aqueous interior of these liposomes. pH sensitive liposomes have been used to deliver nucleic acids encoding the thymidine kinase gene to cell monolayers in culture. Expression of the exogenous gene was detected in the target cells (Zhou et al. (1992) Journal of Controlled Release, 19:269-274).

[0601] One major type of liposomal composition includes phospholipids other than naturally-derived phosphatidylcholine. Neutral liposome compositions, for example, can be formed from dimyristoyl phosphatidylcholine (DMPC) or dipalmitoyl phosphatidylcholine (DPPC). Anionic liposome compositions generally are formed from dimyristoyl phosphatidylglycerol, while anionic fusogenic liposomes are formed primarily from dioleoyl phosphatidylethanolamine (DOPE). Another type of liposomal composition is formed from phosphatidylcholine (PC) such as, for example, soybean PC, and egg PC. Another type is formed from mixtures of phospholipid or phosphatidylcholine or cholesterol.

[0602] Examples of other methods to introduce liposomes into cells in vitro and in vivo include U.S. Pat. Nos. 5,283,185; 5,171,678; WO 94/00569; WO 93/24640; WO 91/16024; Felgner, (1994) J. Biol. Chem. 269:2550; Nabel, (1993) Proc. Natl. Acad. Sci. 90:11307; Nabel, (1992) Human Gene Ther. 3:649; Gershon, (1993) Biochem. 32:7143; and Strauss, (1992) EMBO J. 11:417.

[0603] Non-ionic liposomal systems have also been examined to determine their utility in the delivery of drugs to the skin, in particular systems comprising non-ionic surfactant and cholesterol. Non-ionic liposomal formulations comprising Novasome™ I (glyceryl dilaurate/cholesterol/polyoxyethylene-10-stearyl ether) and Novasome™ II (glyceryl distearate/cholesterol/polyoxyethylene-10-stearyl ether) were used to deliver cyclosporin-A into the dermis of mouse skin. Results indicated that such non-ionic liposomal systems were effective in facilitating the deposition of cyclosporine A into different layers of the skin (Hu et al., (1994) S.T.P.Pharma. Sci., 4(6):466).

[0604] Liposomes also include “sterically stabilized” liposomes, a term which, as used herein, refers to liposomes comprising one or more specialized lipids that, when incorporated into liposomes, result in enhanced circulation lifetimes relative to liposomes lacking such specialized lipids. Examples of sterically stabilized liposomes are those in which part of the vesicle-forming lipid portion of the liposome (A) comprises one or more glycolipids, such as monosialoganglioside G_{M}i, or (B) is derivatized with one or more hydrophilic polymers, such as a polyethylene glycol (PEG) moiety. While not wishing to be bound by any particular theory, it is thought in the art that, at least for sterically stabilized liposomes containing gangliosides, sphingomyelin, or PEG-derivatized lipids, the enhanced circulation half-life of these sterically stabilized liposomes derives from a reduced uptake into cells of the reticuloendothelial system (RES) (Allen et al., (1987) FEBS Letters, 223:42; Wu et al., (1993) Cancer Research, 53:3765).

[0605] Various liposomes comprising one or more glycolipids are known in the art. Papahadjopoulos et al. (Ann. N.Y. Acad. Sci., (1987), 507:64) reported the ability of monosialoganglioside G_{M}i, galactocerebroside sulfate and phosphatidylinositol to improve blood half-lives of liposomes. These findings were expounded upon by Gabizon et al. (Proc. Natl. Acad. Sci. U.S.A., (1988), 85:6949). U.S. Pat. No. 4,837,028 and WO 88/04924, both to Allen et al., disclose liposomes comprising (1) sphingomyelin and (2) the ganglioside G_{M}i or a galactocerebroside sulfate ester. U.S. Pat. No. 5,543,152 (Webb et al.) discloses liposomes comprising sphingomyelin. Liposomes comprising 1,2-sn-dimyristoylphosphatidylcholine are disclosed in WO 97/13499 (Lim et al).

[0606] In one embodiment, cationic liposomes are used. Cationic liposomes possess the advantage of being able to fuse to the cell membrane. Non-cationic liposomes, although not able to fuse as efficiently with the plasma membrane, are taken up by macrophages in vivo and can be used to deliver RNAi agents to macrophages.

[0607] Further advantages of liposomes include: liposomes obtained from natural phospholipids are biocompatible and biodegradable; liposomes can incorporate a wide range of water and lipid soluble drugs; liposomes can protect encapsulated RNAi agents in their internal compartments from metabolism and degradation (Rosoff, in “Pharmaceutical Dosage Forms,” Lieberman, Rieger and Banker (Eds.), 1988, volume 1, p. 245). Important considerations in the preparation of liposome formulations are the lipid surface charge, vesicle size and the aqueous volume of the liposomes.

[0608] A positively charged synthetic cationic lipid, N-[1-(2,3-dioleyloxy)propyl]-N,N,N-trimethylammonium chloride (DOTMA) can be used to form small liposomes that interact spontaneously with nucleic acid to form lipid-nucleic acid complexes which are capable of fusing with the negatively charged lipids of the cell membranes of tissue culture cells, resulting in delivery of RNAi agent (see, e.g., Felgner, P. L. et al., (1987) Proc. Natd. Acad. Sci. USA 8:7413-7417, and U.S. Pat. No. 4,897,355 for a description of DOTMA and its use with DNA).

[0609] A DOTMA analogue, 1,2-bis(oleoyloxy)-3-(trimethylammonia)propane (DOTAP) can be used in combination with a phospholipid to form DNA-complexing vesicles. LipofectinT^{M} Bethesda Research Laboratories, Gaithersburg, Md.) is an effective agent for the delivery of highly anionic nucleic acids into living tissue culture cells that comprise positively charged DOTMA liposomes which interact spontaneously with negatively charged polynucleotides to form complexes. When enough positively charged liposomes are used, the net charge on the resulting complexes is also positive. Positively charged complexes prepared in this way spontaneously attach to negatively charged cell surfaces, fuse with the plasma membrane, and efficiently deliver functional nucleic acids into, for example, tissue culture cells. Another commercially available cationic lipid, 1,2-bis(oleoyloxy)-3,3-(trimethylammonia)propane (“DOTAP”) (Boehringer Mannheim, Indianapolis, Indiana) differs from DOTMA in that the oleoyl moieties are linked by ester, rather than ether linkages.

[0610] Other reported cationic lipid compounds include those that have been conjugated to a variety of moieties including, for example, carboxyspermine which has been conjugated to one of two types of lipids and includes compounds such as 5-carboxyspermylglycine dioctaoleoylamide (“DOGS”) (Transfectam™, Promega, Madison, Wisconsin) and dipalmitoylphosphatidylethanolamine 5-carboxyspermyl-amide (“DPPES”) (see, e.g., U.S. Pat. No. 5,171,678).

[0611] Another cationic lipid conjugate includes derivatization of the lipid with cholesterol (“DC-Chol”) which has been formulated into liposomes in combination with DOPE (See, Gao, X. and Huang, L., (1991) Biochim. Biophys. Res. Commun. 179:280). Lipopolylysine, made by conjugating polylysine to DOPE, has been reported to be effective for transfection in the presence of serum (Zhou, X. et al., (1991) Biochim. Biophys. Acta 1065:8). For certain cell lines, these liposomes containing conjugated cationic lipids, are said to exhibit lower toxicity and provide more efficient transfection than the DOTMA-containing compositions. Other commercially available cationic lipid products include DMRIE and DMRIE-HP (Vical, La Jolla, California) and Lipofectamine (DOSPA) (Life Technology, Inc., Gaithersburg, Maryland). Other cationic lipids suitable for the delivery of oligonucleotides are described in WO 98/39359 and WO 96/37194.

[0612] Liposomal formulations are particularly suited for topical administration, liposomes present several advantages over other formulations. Such advantages include reduced side effects related to high systemic absorption of the administered drug, increased accumulation of the administered drug at the desired target, and the ability to administer RNAi agent into the skin. In some implementations, liposomes are used for delivering RNAi agent to epidermal cells and also to enhance the penetration of RNAi agent into dermal tissues, e.g., into skin. For example, the liposomes can be applied topically. Topical delivery of drugs formulated as liposomes to the skin has been documented (see, e.g., Weiner et al., (1992) Journal of Drug Targeting, vol. 2,405-410 and du Plessis et al., (1992) Antiviral Research, 18:259-265; Mannino, R. J. and Fould-Fogerite, S., (1998) Biotechniques 6:682-690; Itani, T. et al., (1987) Gene 56:267-276; Nicolau, C. et al. (1987) Meth. Enzymol. 149:157-176; Straubinger, R. M. and Papahadjopoulos, D. (1983) Meth. Enzymol. 101:512-527; Wang, C. Y. and Huang, L., (1987) Proc. Natl. Acad. Sci. USA 84:7851-7855).

[0613] Non-ionic liposomal systems have also been examined to determine their utility in the delivery of drugs to the skin, in particular systems comprising non-ionic surfactant and cholesterol. Non-ionic liposomal formulations comprising Novasome I (glyceryl dilaurate/cholesterol/polyoxyethylene-10-stearyl ether) and Novasome II (glyceryl distearate/cholesterol/polyoxyethylene-10-stearyl ether) were used to deliver a drug into the dermis of mouse skin. Such formulations with RNAi agent are useful for treating a dermatological disorder.

[0614] Liposomes that include RNAi agents can be made highly deformable. Such deformability can enable the liposomes to penetrate through pore that are smaller than the average radius of the liposome. For example, transfersomes are a type of deformable liposomes. Transferosomes can be made by adding surface edge activators, usually surfactants, to a standard liposomal composition. Transfersomes that include RNAi agent can be delivered, for example, subcutaneously by infection in order to deliver RNAi agent to keratinocytes in the skin. In order to cross intact mammalian skin, lipid vesicles must pass through a series of fine pores, each with a diameter less than 50 nm, under the influence of a suitable transdermal gradient. In addition, due to the lipid properties, these transferosomes can be self-optimizing (adaptive to the shape of pores, e.g., in the skin), self-repairing, and can frequently reach their targets without fragmenting, and often self-loading.

[0615] Other formulations amenable to the present disclosure are described in PCT publication No. WO 2008/042973.

[0616] Transfersomes, yet another type of liposomes, are highly deformable lipid aggregates which are attractive candidates for drug delivery vehicles. Transfersomes can be described as lipid droplets which are so highly deformable that they are easily able to penetrate through pores which are smaller than the droplet. Transfersomes are adaptable to the environment in which they are used, e.g., they are self-optimizing (adaptive to the shape of pores in the skin), self-repairing, frequently reach their targets without fragmenting, and often self-loading. To make transfersomes it is possible to add surface edge-activators, usually surfactants, to a standard liposomal composition. Transfersomes have been used to deliver serum albumin to the skin. The transfersome-mediated delivery of serum albumin has been shown to be as effective as subcutaneous injection of a solution containing serum albumin.

[0617] Surfactants find wide application in formulations such as those described herein, particularlay in emulsions (including microemulsions) and liposomes. The most common way of classifying and ranking the properties of the many different types of surfactants, both natural and synthetic, is by the use of the hydrophile/lipophile balance (HLB). The nature of the hydrophilic group (also known as the “head”) provides the most useful means for categorizing the different surfactants used in formulations (Rieger, in Pharmaceutical Dosage Forms, Marcel Dekker, Inc., New York, N.Y., 1988, p. 285).

[0618] If the surfactant molecule is not ionized, it is classified as a nonionic surfactant. Nonionic surfactants find wide application in pharmaceutical and cosmetic products and are usable over a wide range of pH values. In general, their HLB values range from 2 to about 18 depending on their structure. Nonionic surfactants include nonionic esters such as ethylene glycol esters, propylene glycol esters, glyceryl esters, polyglyceryl esters, sorbitan esters, sucrose esters, and ethoxylated esters. Nonionic alkanolamides and ethers such as fatty alcohol ethoxylates, propoxylated alcohols, and ethoxylated/propoxylated block polymers are also included in this class. The polyoxyethylene surfactants are the most popular members of the nonionic surfactant class.

[0619] If the surfactant molecule carries a negative charge when it is dissolved or dispersed in water, the surfactant is classified as anionic. Anionic surfactants include carboxylates such as soaps, acyl lactylates, acyl amides of amino acids, esters of sulfuric acid such as alkyl sulfates and ethoxylated alkyl sulfates, sulfonates such as alkyl benzene sulfonates, acyl isethionates, acyl taurates and sulfosuccinates, and phosphates. The most important members of the anionic surfactant class are the alkyl sulfates and the soaps.

[0620] If the surfactant molecule carries a positive charge when it is dissolved or dispersed in water, the surfactant is classified as cationic. Cationic surfactants include quaternary ammonium salts and ethoxylated amines. The quaternary ammonium salts are the most used members of this class.

[0621] If the surfactant molecule has the ability to carry either a positive or negative charge, the surfactant is classified as amphoteric. Amphoteric surfactants include acrylic acid derivatives, substituted alkylamides, N-alkylbetaines and phosphatides.

The use of surfactants in drug products, formulations and in emulsions has been reviewed (Rieger, in Pharmaceutical Dosage Forms, Marcel Dekker, Inc., New York, N.Y., 1988, p. 285).

[0622] The RNAi agent for use in the methods of the disclosure can also be provided as micellar formulations. “Micelles” are defined herein as a particular type of molecular assembly in which amphipathic molecules are arranged in a spherical structure such that all the hydrophobic portions of the molecules are directed inward, leaving the hydrophilic portions in contact with the surrounding aqueous phase. The converse arrangement exists if the environment is hydrophobic.

[0623] A mixed micellar formulation suitable for delivery through transdermal membranes may be prepared by mixing an aqueous solution of the siRNA composition, an alkali metal C₈ to C₂₂ alkyl sulphate, and a micelle forming compounds. Exemplary micelle forming compounds include lecithin, hyaluronic acid, pharmaceutically acceptable salts of hyaluronic acid, glycolic acid, lactic acid, chamomile extract, cucumber extract, oleic acid, linoleic acid, linolenic acid, monoolein, monooleates, monolaurates, borage oil, evening of primrose oil, menthol, trihydroxy oxo cholanyl glycine and pharmaceutically acceptable salts thereof, glycerin, polyglycerin, lysine, polylysine, triolein, polyoxyethylene ethers and analogues thereof, polidocanol alkyl ethers and analogues thereof, chenodeoxycholate, deoxycholate, and mixtures thereof. The micelle forming compounds may be added at the same time or after addition of the alkali metal alkyl sulphate. Mixed micelles will form with substantially any kind of mixing of the ingredients but vigorous mixing in order to provide smaller size micelles.

[0624] In one method a first micellar composition is prepared which contains the siRNA composition and at least the alkali metal alkyl sulphate. The first micellar composition is then mixed with at least three micelle forming compounds to form a mixed micellar composition. In another method, the micellar composition is prepared by mixing the siRNA composition, the alkali metal alkyl sulphate and at least one of the micelle forming compounds, followed by addition of the remaining micelle forming compounds, with vigorous mixing.

[0625] Phenol or m-cresol may be added to the mixed micellar composition to stabilize the formulation and protect against bacterial growth. Alternatively, phenol or m-cresol may be added with the micelle forming ingredients. An isotonic agent such as glycerin may also be added after formation of the mixed micellar composition.

[0626] For delivery of the micellar formulation as a spray, the formulation can be put into an aerosol dispenser and the dispenser is charged with a propellant. The propellant, which is under pressure, is in liquid form in the dispenser. The ratios of the ingredients are adjusted so that the aqueous and propellant phases become one, i.e., there is one phase. If there are two phases, it is necessary to shake the dispenser prior to dispensing a portion of the contents, e.g., through a metered valve. The dispensed dose of pharmaceutical agent is propelled from the metered valve in a fine spray.

[0627] Propellants may include hydrogen-containing chlorofluorocarbons, hydrogen-containing fluorocarbons, dimethyl ether and diethyl ether. In certain embodiments, HFA 134a (1,1,1,2 tetrafluoroethane) may be used.

[0628] The specific concentrations of the essential ingredients can be determined by relatively straightforward experimentation. For absorption through the oral cavities, it is often desirable to increase, e.g., at least double or triple, the dosage for through injection or administration through the gastrointestinal tract.

[0629] Lipid Particles

[0630] RNAi agents, e.g., dsRNAs of in the disclosure may be fully encapsulated in a lipid formulation, e.g., a LNP, or other nucleic acid-lipid particle.

[0631] As used herein, the term “LNP” refers to a stable nucleic acid-lipid particle. LNPs typically contain a cationic lipid, a non-cationic lipid, and a lipid that prevents aggregation of the particle (e.g., a PEG-lipid conjugate). LNPs are extremely useful for systemic applications, as they exhibit extended circulation lifetimes following intravenous (i.v.) injection and accumulate at distal sites (e.g., sites physically separated from the administration site). LNPs include “pSPLP,” which include an encapsulated condensing agent-nucleic acid complex as set forth in WO 00/03683. The particles of the present disclosure typically have a mean diameter of about 50 nm to about 150 nm, more typically about 60 nm to about 130 nm, more typically about 70 nm to about 110 nm, most typically about 70 nm to about 90 nm, and are substantially nontoxic. In addition, the nucleic acids when present in the nucleic acid-lipid particles of the present disclosure are resistant in aqueous solution to degradation with a nuclease. Nucleic acid-lipid particles and their method of preparation are disclosed in, e.g., U.S. Pat. Nos. 5,976,567; 5,981,501; 6,534,484; 6,586,410; 6,815,432; United States Patent publication No. 2010/0324120 and WO 96/40964.

[0632] In one embodiment, the lipid to drug ratio (mass/mass ratio) (e.g., lipid to dsRNA ratio) will be in the range of from about 1:1 to about 50:1, from about 1:1 to about 25:1, from about 3:1 to about 15:1, from about 4:1 to about 10:1, from about 5:1 to about 9:1, or about 6:1 to about 9:1. Ranges intermediate to the above recited ranges are also contemplated to be part of the disclosure.

[0633] Certain specific LNP formulations for delivery of RNAi agents have been described in the art, including, e.g., “LNP01” formulations as described in, e.g., WO 2008/042973, which is hereby incorporated by reference.

Additional exemplary lipid-dsRNA formulations are identified
in the table below.

| | | cationic lipid/non-cationic |
|---|---|---|
| | | lipid/cholesterol/ |
| | | PEG-lipid conjugate |
| | Ionizable/Cationic Lipid | Lipid:siRNA ratio |
| SNALP-1 | 1,2-Dilinolenyloxy-N,N- | DLinDMA/DPPC/ |
| | dimethylaminopropane | Cholesterol/PEG-cDM |
| | (DLinDMA) | (57.1/7.1/34.4/1.4) |
| | | lipid:siRNA ~7:1 |
| 2-XTC | 2,2-Dilinoleyl-4- | XTC/DPPC/ |
| | dimethylaminoethyl-[1,3]- | Cholesterol/PEG-cDMA |
| | dioxolane (XTC) | 57.1/7.1/34.4/1.4 |
| | | lipid:siRNA ~7:1 |
| LNP05 | 2,2-Dilinoleyl-4- | XTC/DSPC/ |
| | dimethylaminoethyl-[1,3]- | Cholesterol/PEG-DMG |
| | dioxolane (XTC) | 57.5/7.5/31.5/3.5 |
| | | lipid:siRNA ~6:1 |
| LNP06 | 2,2-Dilinoleyl-4- | XTC/DSPC/ |
| | dimethylaminoethyl-[1,3]- | Cholesterol/PEG-DMG |
| | dioxolane (XTC) | 57.5/7.5/31.5/3.5 |
| | | lipid:siRNA ~11:1 |
| LNP07 | 2,2-Dilinoleyl-4- | XTC/DSPC/ |
| | dimethylaminoethyl-[1,3]- | Cholesterol/PEG-DMG |
| | dioxolane (XTC) | 60/7.5/31/1.5, |
| | | lipid:siRNA ~6:1 |
| LNP08 | 2,2-Dilinoleyl-4- | XTC/DSPC/ |
| | dimethylaminoethyl-[1,3]- | Cholesterol/PEG-DMG |
| | dioxolane (XTC) | 60/7.5/31/1.5, |
| | | lipid:siRNA ~11:1 |
| LNP09 | 2,2-Dilinoleyl-4- | XTC/DSPC/ |
| | dimethylaminoethyl-[1,3]- | Cholesterol/PEG-DMG |
| | dioxolane (XTC) | 50/10/38.5/1.5 |
| | | Lipid:siRNA 10:1 |
| LNP10 | (3aR,5s,6aS)-N,N- | ALN100/DSPC/ |
| | dimethyl-2,2-di((9Z,12Z)- | Cholesterol/PEG-DMG |
| | octadeca-9,12- | 50/10/38.5/1.5 |
| | dienyl)tetrahydro-3aH- | Lipid:siRNA 10:1 |
| | cyclopenta[d][1,3]dioxol- | |
| | 5-amine (ALN100) | |
| LNP11 | (6Z,9Z,28Z,31Z)- | MC-3/DSPC/ |
| | heptatriaconta-6,9,28,31- | Cholesterol/PEG-DMG |
| | tetraen-19-yl 4- | 50/10/38.5/1.5 |
| | (dimethylamino)butanoate | Lipid:siRNA 10:1 |
| | (MPRNP) | |
| LNP12 | 1,1′-(2-(4-(2-((2-(bis(2- | Tech G1/DSPC/ |
| | hydroxydodecyl)amino)ethyl)(2- | Cholesterol/PEG-DMG |
| | hydroxydodecyl) | 50/10/38.5/1.5 |
| | amino)ethyl)piperazin-1- | Lipid:siRNA 10:1 |
| | yl)ethylazanediyl)didodecan- | |
| | 2-ol (Tech G1) | |
| LNP13 | XTC | XTC/DSPC/Chol/PEG-DMG |
| | | 50/10/38.5/1.5 |
| | | Lipid:siRNA: 33:1 |
| LNP14 | MPRNP | MPRNP/DSPC/ |
| | | Chol/PEG-DMG |
| | | 40/15/40/5 |
| | | Lipid:siRNA: 11:1 |
| LNP15 | MPRNP | MPRNP/DSPC/ |
| | | Chol/PEG-DSG/GalNAd |
| | | PEG-DSG |
| | | 50/10/35/4.5/0.5 |
| | | Lipid:siRNA: 11:1 |
| LNP16 | MPRNP | MPRNP/DSPC/ |
| | | Chol/PEG-DMG |
| | | 50/10/38.5/1.5 |
| | | Lipid:siRNA: 7:1 |
| LNP17 | MPRNP | MPRNP/DSPC/ |
| | | Chol/PEG-DSG |
| | | 50/10/38.5/1.5 |
| | | Lipid:siRNA: 10:1 |
| LNP18 | MPRNP | MPRNP/DSPC/ |
| | | Chol/PEG-DMG |
| | | 50/10/38.5/1.5 |
| | | Lipid:siRNA: 12:1 |
| LNP19 | MPRNP | MPRNP/DSPC/ |
| | | Chol/PEG-DMG |
| | | 50/10/35/5 |
| | | Lipid:siRNA: 8:1 |
| LNP20 | MPRNP | MPRNP/DSPC/ |
| | | Chol/PEG-DPG |
| | | 50/10/38.5/1.5 |
| | | Lipid:siRNA: 10:1 |
| LNP21 | C12-200 | C12-200/DSPC/ |
| | | Chol/PEG-DSG |
| | | 50/10/38.5/1.5 |
| | | Lipid:siRNA: 7:1 |
| LNP22 | XTC | XTC/DSPC/Chol/PEG-DSG |
| | | 50/10/38.5/1.5 |
| | | Lipid:siRNA: 10:1 |

DSPC: distearoylphosphatidylcholine
DPPC: dipalmitoylphosphatidylcholine
PEG-DMG: PEG-didimyristoyl glycerol (C14-PEG, or PEG-C14) (PEG with avg mol wt of 2000)
PEG-DSG: PEG-distyryl glycerol (C18-PEG, or PEG-C18) (PEG with avg mol wt of 2000)
PEG-CDMA: PEG-carbamoyl-1,2-dimyristyloxypropylamine (PEG with avg mol wt of 2000)
SNALP (1,2-Dilinolenyloxy-N,N-dimethylaminopropane (DLinDMA)) comprising formulations are described in WO 2009/127060, which is hereby incorporated by reference.
XTC comprising formulations are described in WO 2010/088537, the entire contents of which are hereby incorporated herein by reference.
MPRNP comprising formulations are described, e.g., in United States Patent Publication No. 2010/0324120, the entire contents of which are hereby incorporated by reference.
ALNY-100 comprising formulations are described in WO 2010/054406, the entire contents of which are hereby incorporated herein by reference.
C12-200 comprising formulations are described in WO 2010/129709, the entire contents of which are hereby incorporated herein by reference.

[0634] Compositions and formulations for oral administration include powders or granules, microparticulates, nanoparticulates, suspensions or solutions in water or non-aqueous media, capsules, gel capsules, sachets, tablets or minitablets. Thickeners, flavoring agents, diluents, emulsifiers, dispersing aids or binders can be desirable. In some embodiments, oral formulations are those in which dsRNAs featured in the disclosure are administered in conjunction with one or more penetration enhancer surfactants and chelators. Suitable surfactants include fatty acids or esters or salts thereof, bile acids or salts thereof. Suitable bile acids/salts include chenodeoxycholic acid (CDCA) and ursodeoxychenodeoxycholic acid (UDCA), cholic acid, dehydrocholic acid, deoxycholic acid, glucholic acid, glycholic acid, glycodeoxycholic acid, taurocholic acid, taurodeoxycholic acid, sodium tauro-24,25-dihydro-fusidate and sodium glycodihydrofusidate. Suitable fatty acids include arachidonic acid, undecanoic acid, oleic acid, lauric acid, caprylic acid, capric acid, myristic acid, palmitic acid, stearic acid, linoleic acid, linolenic acid, dicaprate, tricaprate, monoolein, dilaurin, glyceryl 1-monocaprate, 1-dodecylazacycloheptan-2-one, an acylcarnitine, an acylcholine, or a monoglyceride, a diglyceride or a pharmaceutically acceptable salt thereof (e.g., sodium). In some embodiments, combinations of penetration enhancers are used, for example, fatty acids/salts in combination with bile acids/salts. One exemplary combination is the sodium salt of lauric acid, capric acid and UDCA. Further penetration enhancers include polyoxyethylene-9-lauryl ether, polyoxyethylene-20-cetyl ether. DsRNAs featured in the disclosure can be delivered orally, in granular form including sprayed dried particles, or complexed to form micro or nanoparticles. DsRNA complexing agents include poly-amino acids; polyimines; polyacrylates; polyalkylacrylates, polyoxethanes, polyalkylcyanoacrylates; cationized gelatins, albumins, starches, acrylates, polyethyleneglycols (PEG) and starches; polyalkylcyanoacrylates; DEAE-derivatized polyimines, pollulans, celluloses and starches. Suitable complexing agents include chitosan, N-trimethylchitosan, poly-L-lysine, polyhistidine, polyornithine, polyspermines, protamine, polyvinylpyridine, polythiodiethylaminomethylethylene P(TDAE), polyaminostyrene (e.g., p-amino), poly(methylcyanoacrylate), poly(ethylcyanoacrylate), poly(butylcyanoacrylate), poly(isobutylcyanoacrylate), poly(isohexylcynaoacrylate), DEAE-methacrylate, DEAE-hexylacrylate, DEAE-acrylamide, DEAE-albumin and DEAE-dextran, polymethylacrylate, polyhexylacrylate, poly(D,L-lactic acid), poly(DL-lactic-co-glycolic acid (PLGA), alginate, and polyethyleneglycol (PEG). Oral formulations for dsRNAs and their preparation are described in detail in U.S. Pat. No. 6,887,906, U.S. 2003/0027780, and U.S. Pat. No. 6,747,014, each of which is incorporated herein by reference.

[0635] Compositions and formulations for parenteral, intraparenchymal (into the brain), intrathecal, intraventricular or intrahepatic administration can include sterile aqueous solutions which can also contain buffers, diluents and other suitable additives such as, but not limited to, penetration enhancers, carrier compounds and other pharmaceutically acceptable carriers or excipients.

[0636] Pharmaceutical compositions of the present disclosure include, but are not limited to, solutions, emulsions, and liposome-containing formulations. These compositions can be generated from a variety of components that include, but are not limited to, preformed liquids, self-emulsifying solids and self-emulsifying semisolids. Particularly useful formulations include those that target the brain when treating PRNP-associated diseases or disorders.

[0637] The pharmaceutical formulations of the present disclosure, which can conveniently be presented in unit dosage form, can be prepared according to conventional techniques well known in the pharmaceutical industry. Such techniques include the step of bringing into association the active ingredients with the pharmaceutical carrier(s) or excipient(s). In general, the formulations are prepared by uniformly and intimately bringing into association the active ingredients with liquid carriers or finely divided solid carriers or both, and then, if necessary, shaping the product.

[0638] The compositions of the present disclosure can be formulated into any of many possible dosage forms such as, but not limited to, tablets, capsules, gel capsules, liquid syrups, soft gels, suppositories, and enemas. The compositions of the present disclosure can also be formulated as suspensions in aqueous, non-aqueous or mixed media. Aqueous suspensions can further contain substances which increase the viscosity of the suspension including, for example, sodium carboxymethylcellulose, sorbitol or dextran. The suspension can also contain stabilizers.

[0639] Additional Formulations

[0640] i. Emulsions

[0641] The compositions of the present disclosure can be prepared and formulated as emulsions. Emulsions are typically heterogeneous systems of one liquid dispersed in another in the form of droplets usually exceeding 0.1 m in diameter (see e.g., Ansel's Pharmaceutical Dosage Forms and Drug Delivery Systems, Allen, LV., Popovich NG., and Ansel HC., 2004, Lippincott Williams & Wilkins (8th ed.), New York, NY; Idson, in Pharmaceutical Dosage Forms, Lieberman, Rieger and Banker (Eds.), 1988, Marcel Dekker, Inc., New York, N.Y., volume 1, p. 199; Rosoff, in Pharmaceutical Dosage Forms, Lieberman, Rieger and Banker (Eds.), 1988, Marcel Dekker, Inc., New York, N.Y., Volume 1, p. 245; Block in Pharmaceutical Dosage Forms, Lieberman, Rieger and Banker (Eds.), 1988, Marcel Dekker, Inc., New York, N.Y., volume 2, p. 335; Higuchi et al., in Remington's Pharmaceutical Sciences, Mack Publishing Co., Easton, Pa., 1985, p. 301). Emulsions are often biphasic systems comprising two immiscible liquid phases intimately mixed and dispersed with each other. In general, emulsions can be of either the water-in-oil (w/o) or the oil-in-water (o/w) variety. When an aqueous phase is finely divided into and dispersed as minute droplets into a bulk oily phase, the resulting composition is called a water-in-oil (w/o) emulsion. Alternatively, when an oily phase is finely divided into and dispersed as minute droplets into a bulk aqueous phase, the resulting composition is called an oil-in-water (o/w) emulsion. Emulsions can contain additional components in addition to the dispersed phases, and the active drug which can be present as a solution in either aqueous phase, oily phase or itself as a separate phase. Pharmaceutical excipients such as emulsifiers, stabilizers, dyes, and anti-oxidants can also be present in emulsions as needed. Pharmaceutical emulsions can also be multiple emulsions that are comprised of more than two phases such as, for example, in the case of oil-in-water-in-oil (o/w/o) and water-in-oil-in-water (w/o/w) emulsions. Such complex formulations often provide certain advantages that simple binary emulsions do not. Multiple emulsions in which individual oil droplets of an o/w emulsion enclose small water droplets constitute a w/o/w emulsion. Likewise, a system of oil droplets enclosed in globules of water stabilized in an oily continuous phase provides an o/w/o emulsion.

[0642] Emulsions are characterized by little or no thermodynamic stability. Often, the dispersed or discontinuous phase of the emulsion is well dispersed into the external or continuous phase and maintained in this form through the means of emulsifiers or the viscosity of the formulation. Either of the phases of the emulsion can be a semisolid or a solid, as is the case of emulsion-style ointment bases and creams. Other means of stabilizing emulsions entail the use of emulsifiers that can be incorporated into either phase of the emulsion. Emulsifiers can broadly be classified into four categories: synthetic surfactants, naturally occurring emulsifiers, absorption bases, and finely dispersed solids (see e.g., Ansel's Pharmaceutical Dosage Forms and Drug Delivery Systems, Allen, LV., Popovich NG., and Ansel HC., 2004, Lippincott Williams & Wilkins (8th ed.), New York, NY; Idson, in Pharmaceutical Dosage Forms, Lieberman, Rieger and Banker (Eds.), 1988, Marcel Dekker, Inc., New York, N.Y., volume 1, p. 199).

[0643] Synthetic surfactants, also known as surface active agents, have found wide applicability in the formulation of emulsions and have been reviewed in the literature (see e.g., Ansel's Pharmaceutical Dosage Forms and Drug Delivery Systems, Allen, LV., Popovich NG., and Ansel HC., 2004, Lippincott Williams & Wilkins (8th ed.), New York, NY; Rieger, in Pharmaceutical Dosage Forms, Lieberman, Rieger and Banker (Eds.), 1988, Marcel Dekker, Inc., New York, N.Y., volume 1, p. 285; Idson, in Pharmaceutical Dosage Forms, Lieberman, Rieger and Banker (Eds.), Marcel Dekker, Inc., New York, N.Y., 1988, volume 1, p. 199). Surfactants are typically amphiphilic and comprise a hydrophilic and a hydrophobic portion. The ratio of the hydrophilic to the hydrophobic nature of the surfactant has been termed the hydrophile/lipophile balance (HLB) and is a valuable tool in categorizing and selecting surfactants in the preparation of formulations. Surfactants can be classified into different classes based on the nature of the hydrophilic group: nonionic, anionic, cationic and amphoteric (see e.g., Ansel's Pharmaceutical Dosage Forms and Drug Delivery Systems, Allen, LV., Popovich NG., and Ansel HC., 2004, Lippincott Williams & Wilkins (8th ed.), New York, NY Rieger, in Pharmaceutical Dosage Forms, Lieberman, Rieger and Banker (Eds.), 1988, Marcel Dekker, Inc., New York, N.Y., volume 1, p. 285).

[0644] Naturally occurring emulsifiers used in emulsion formulations include lanolin, beeswax, phosphatides, lecithin and acacia. Absorption bases possess hydrophilic properties such that they can soak up water to form w/o emulsions yet retain their semisolid consistencies, such as anhydrous lanolin and hydrophilic petrolatum. Finely divided solids have also been used as good emulsifiers especially in combination with surfactants and in viscous preparations. These include polar inorganic solids, such as heavy metal hydroxides, nonswelling clays such as bentonite, attapulgite, hectorite, kaolin, montmorillonite, colloidal aluminum silicate and colloidal magnesium aluminum silicate, pigments and nonpolar solids such as carbon or glyceryl tristearate.

[0645] A large variety of non-emulsifying materials are also included in emulsion formulations and contribute to the properties of emulsions. These include fats, oils, waxes, fatty acids, fatty alcohols, fatty esters, humectants, hydrophilic colloids, preservatives and antioxidants (Block, in Pharmaceutical Dosage Forms, Lieberman, Rieger and Banker (Eds.), 1988, Marcel Dekker, Inc., New York, N.Y., volume 1, p. 335; Idson, in Pharmaceutical Dosage Forms, Lieberman, Rieger and Banker (Eds.), 1988, Marcel Dekker, Inc., New York, N.Y., volume 1, p. 199).

[0646] Hydrophilic colloids or hydrocolloids include naturally occurring gums and synthetic polymers such as polysaccharides (for example, acacia, agar, alginic acid, carrageenan, guar gum, karaya gum, and tragacanth), cellulose derivatives (for example, carboxymethylcellulose and carboxypropylcellulose), and synthetic polymers (for example, carbomers, cellulose ethers, and carboxyvinyl polymers). These disperse or swell in water to form colloidal solutions that stabilize emulsions by forming strong interfacial films around the dispersed-phase droplets and by increasing the viscosity of the external phase.

[0647] Since emulsions often contain a number of ingredients such as carbohydrates, proteins, sterols and phosphatides that can readily support the growth of microbes, these formulations often incorporate preservatives. Commonly used preservatives included in emulsion formulations include methyl paraben, propyl paraben, quaternary ammonium salts, benzalkonium chloride, esters of p-hydroxybenzoic acid, and boric acid. Antioxidants are also commonly added to emulsion formulations to prevent deterioration of the formulation. Antioxidants used can be free radical scavengers such as tocopherols, alkyl gallates, butylated hydroxyanisole, butylated hydroxytoluene, or reducing agents such as ascorbic acid and sodium metabisulfite, and antioxidant synergists such as citric acid, tartaric acid, and lecithin.

[0648] The application of emulsion formulations via dermatological, oral and parenteral routes and methods for their manufacture have been reviewed in the literature (see e.g., Ansel's Pharmaceutical Dosage Forms and Drug Delivery Systems, Allen, LV., Popovich NG., and Ansel HC., 2004, Lippincott Williams & Wilkins (8th ed.), New York, NY; Idson, in Pharmaceutical Dosage Forms, Lieberman, Rieger and Banker (Eds.), 1988, Marcel Dekker, Inc., New York, N.Y., volume 1, p. 199). Emulsion formulations for oral delivery have been very widely used because of ease of formulation, as well as efficacy from an absorption and bioavailability standpoint (see e.g., Ansel's Pharmaceutical Dosage Forms and Drug Delivery Systems, Allen, LV., Popovich NG., and Ansel HC., 2004, Lippincott Williams & Wilkins (8th ed.), New York, NY; Rosoff, in Pharmaceutical Dosage Forms, Lieberman, Rieger and Banker (Eds.), 1988, Marcel Dekker, Inc., New York, N.Y., volume 1, p. 245; Idson, in Pharmaceutical Dosage Forms, Lieberman, Rieger and Banker (Eds.), 1988, Marcel Dekker, Inc., New York, N.Y., volume 1, p. 199). Mineral-oil base laxatives, oil-soluble vitamins and high fat nutritive preparations are among the materials that have commonly been administered orally as o/w emulsions.

[0649] ii. Microemulsions

[0650] In one embodiment of the present disclosure, the compositions of RNAi agents and nucleic acids are formulated as microemulsions. A microemulsion can be defined as a system of water, oil and amphiphile which is a single optically isotropic and thermodynamically stable liquid solution (see e.g., Ansel's Pharmaceutical Dosage Forms and Drug Delivery Systems, Allen, LV., Popovich NG., and Ansel HC., 2004, Lippincott Williams & Wilkins (8th ed.), New York, NY; Rosoff, in Pharmaceutical Dosage Forms, Lieberman, Rieger and Banker (Eds.), 1988, Marcel Dekker, Inc., New York, N.Y., volume 1, p. 245). Typically, microemulsions are systems that are prepared by first dispersing an oil in an aqueous surfactant solution and then adding a sufficient amount of a fourth component, generally an intermediate chain-length alcohol to form a transparent system. Therefore, microemulsions have also been described as thermodynamically stable, isotropically clear dispersions of two immiscible liquids that are stabilized by interfacial films of surface-active molecules (Leung and Shah, in: Controlled Release of Drugs: Polymers and Aggregate Systems, Rosoff, M., Ed., 1989, VCH Publishers, New York, pages 185-215). Microemulsions commonly are prepared via a combination of three to five components that include oil, water, surfactant, cosurfactant and electrolyte. Whether the microemulsion is of the water-in-oil (w/o) or an oil-in-water (o/w) type is dependent on the properties of the oil and surfactant used, and on the structure and geometric packing of the polar heads and hydrocarbon tails of the surfactant molecules (Schott, in Remington's Pharmaceutical Sciences, Mack Publishing Co., Easton, Pa., 1985, p. 271).

[0651] The phenomenological approach utilizing phase diagrams has been extensively studied and has yielded a comprehensive knowledge, to one skilled in the art, of how to formulate microemulsions (see e.g., Ansel's Pharmaceutical Dosage Forms and Drug Delivery Systems, Allen, LV., Popovich NG., and Ansel HC., 2004, Lippincott Williams & Wilkins (8th ed.), New York, NY; Rosoff, in Pharmaceutical Dosage Forms, Lieberman, Rieger and Banker (Eds.), 1988, Marcel Dekker, Inc., New York, N.Y., volume 1, p. 245; Block, in Pharmaceutical Dosage Forms, Lieberman, Rieger and Banker (Eds.), 1988, Marcel Dekker, Inc., New York, N.Y., volume 1, p. 335). Compared to conventional emulsions, microemulsions offer the advantage of solubilizing water-insoluble drugs in a formulation of thermodynamically stable droplets that are formed spontaneously.

[0652] Surfactants used in the preparation of microemulsions include, but are not limited to, ionic surfactants, non-ionic surfactants, Brij 96, polyoxyethylene oleyl ethers, polyglycerol fatty acid esters, tetraglycerol monolaurate (ML310), tetraglycerol monooleate (MO310), hexaglycerol monooleate (PO310), hexaglycerol pentaoleate (PO500), decaglycerol monocaprate (MCA750), decaglycerol monooleate (MO750), decaglycerol sequioleate (SO750), decaglycerol decaoleate (DAO750), alone or in combination with cosurfactants. The cosurfactant, usually a short-chain alcohol such as ethanol, 1-propanol, and 1-butanol, serves to increase the interfacial fluidity by penetrating into the surfactant film and consequently creating a disordered film because of the void space generated among surfactant molecules. Microemulsions can, however, be prepared without the use of cosurfactants and alcohol-free self-emulsifying microemulsion systems are known in the art. The aqueous phase can typically be, but is not limited to, water, an aqueous solution of the drug, glycerol, PEG300, PEG400, polyglycerols, propylene glycols, and derivatives of ethylene glycol. The oil phase can include, but is not limited to, materials such as Captex 300, Captex 355, Capmul MCM, fatty acid esters, medium chain (C8-C12) mono, di, and tri-glycerides, polyoxyethylated glyceryl fatty acid esters, fatty alcohols, polyglycolized glycerides, saturated polyglycolized C8-C10 glycerides, vegetable oils and silicone oil.

[0653] Microemulsions are particularly of interest from the standpoint of drug solubilization and the enhanced absorption of drugs. Lipid based microemulsions (both o/w and w/o) have been proposed to enhance the oral bioavailability of drugs, including peptides (see e.g., U.S. Pat. Nos. 6,191,105; 7,063,860; 7,070,802; 7,157,099; Constantinides et al., Pharmaceutical Research, 1994, 11, 1385-1390; Ritschel, Meth. Find. Exp. Clin. Pharmacol., 1993, 13, 205). Microemulsions afford advantages of improved drug solubilization, protection of drug from enzymatic hydrolysis, possible enhancement of drug absorption due to surfactant-induced alterations in membrane fluidity and permeability, ease of preparation, ease of oral administration over solid dosage forms, improved clinical potency, and decreased toxicity (see e.g., U.S. Pat. Nos. 6,191,105; 7,063,860; 7,070,802; 7,157,099; Constantinides et al., Pharmaceutical Research, 1994, 11, 1385; Ho et al., J. Pharm. Sci., 1996, 85, 138-143). Often microemulsions can form spontaneously when their components are brought together at ambient temperature. This can be particularly advantageous when formulating thermolabile drugs, peptides or RNAi agents. Microemulsions have also been effective in the transdermal delivery of active components in both cosmetic and pharmaceutical applications. It is expected that the microemulsion compositions and formulations of the present disclosure will facilitate the increased systemic absorption of RNAi agents and nucleic acids from the gastrointestinal tract, as well as improve the local cellular uptake of RNAi agents and nucleic acids.

[0654] Microemulsions of the present disclosure can also contain additional components and additives such as sorbitan monostearate (Grill 3), Labrasol, and penetration enhancers to improve the properties of the formulation and to enhance the absorption of the RNAi agents and nucleic acids of the present disclosure. Penetration enhancers used in the microemulsions of the present disclosure can be classified as belonging to one of five broad categories—surfactants, fatty acids, bile salts, chelating agents, and non-chelating non-surfactants (Lee et al., Critical Reviews in Therapeutic Drug Carrier Systems, 1991, p. 92). Each of these classes has been discussed above.

[0655] iii. Microparticles

[0656] An RNAi agent of the disclosure may be incorporated into a particle, e.g., a microparticle. Microparticles can be produced by spray-drying, but may also be produced by other methods including lyophilization, evaporation, fluid bed drying, vacuum drying, or a combination of these techniques.

[0657] iv. Penetration Enhancers

[0658] In one embodiment, the present disclosure employs various penetration enhancers to effect the efficient delivery of nucleic acids, particularly RNAi agents, to the skin of animals. Most drugs are present in solution in both ionized and nonionized forms. However, usually only lipid soluble or lipophilic drugs readily cross cell membranes. It has been discovered that even non-lipophilic drugs can cross cell membranes if the membrane to be crossed is treated with a penetration enhancer. In addition to aiding the diffusion of non-lipophilic drugs across cell membranes, penetration enhancers also enhance the permeability of lipophilic drugs.

[0659] Penetration enhancers can be classified as belonging to one of five broad categories, i.e., surfactants, fatty acids, bile salts, chelating agents, and non-chelating non-surfactants (see e.g., Malmsten, M. Surfactants and polymers in drug delivery, Informa Health Care, New York, NY, 2002; Lee et al., Critical Reviews in Therapeutic Drug Carrier Systems, 1991, p. 92). Each of the above mentioned classes of penetration enhancers are described below in greater detail.

[0660] Surfactants (or “surface-active agents”) are chemical entities which, when dissolved in an aqueous solution, reduce the surface tension of the solution or the interfacial tension between the aqueous solution and another liquid, with the result that absorption of RNAi agents through the mucosa is enhanced. In addition to bile salts and fatty acids, these penetration enhancers include, for example, sodium lauryl sulfate, polyoxyethylene-9-lauryl ether and polyoxyethylene-20-cetyl ether) (see e.g., Malmsten, M. Surfactants and polymers in drug delivery, Informa Health Care, New York, NY, 2002; Lee et al., Critical Reviews in Therapeutic Drug Carrier Systems, 1991, p. 92); and perfluorochemical emulsions, such as FC-43. Takahashi et al., J. Pharm. Pharmacol., 1988, 40, 252).

[0661] Various fatty acids and their derivatives which act as penetration enhancers include, for example, oleic acid, lauric acid, capric acid (n-decanoic acid), myristic acid, palmitic acid, stearic acid, linoleic acid, linolenic acid, dicaprate, tricaprate, monoolein (1-monooleoyl-rac-glycerol), dilaurin, caprylic acid, arachidonic acid, glycerol 1-monocaprate, 1-dodecylazacycloheptan-2-one, acylcarnitines, acylcholines, C₁₋₂₀ alkyl esters thereof (e.g., methyl, isopropyl and t-butyl), and mono- and di-glycerides thereof (i.e., oleate, laurate, caprate, myristate, palmitate, stearate, linoleate, etc.) (see e.g., Touitou, E., et al. Enhancement in Drug Delivery, CRC Press, Danvers, M A, 2006; Lee et al., Critical Reviews in Therapeutic Drug Carrier Systems, 1991, p. 92; Muranishi, Critical Reviews in Therapeutic Drug Carrier Systems, 1990, 7, 1-33; El Hariri et al., J. Pharm. Pharmacol., 1992, 44, 651-654).

[0662] The physiological role of bile includes the facilitation of dispersion and absorption of lipids and fat-soluble vitamins (see e.g., Malmsten, M. Surfactants and polymers in drug delivery, Informa Health Care, New York, NY, 2002; Brunton, Chapter 38 in: Goodman & Gilman's The Pharmacological Basis of Therapeutics, 9th Ed., Hardman et al. Eds., McGraw-Hill, New York, 1996, pp. 934-935). Various natural bile salts, and their synthetic derivatives, act as penetration enhancers. Thus the term “bile salts” includes any of the naturally occurring components of bile as well as any of their synthetic derivatives. Suitable bile salts include, for example, cholic acid (or its pharmaceutically acceptable sodium salt, sodium cholate), dehydrocholic acid (sodium dehydrocholate), deoxycholic acid (sodium deoxycholate), glucholic acid (sodium glucholate), glycholic acid (sodium glycocholate), glycodeoxycholic acid (sodium glycodeoxycholate), taurocholic acid (sodium taurocholate), taurodeoxycholic acid (sodium taurodeoxycholate), chenodeoxycholic acid (sodium chenodeoxycholate), ursodeoxycholic acid (UDCA), sodium tauro-24,25-dihydro-fusidate (STDHF), sodium glycodihydrofusidate and polyoxyethylene-9-lauryl ether (POE) (see e.g., Malmsten, M. Surfactants and polymers in drug delivery, Informa Health Care, New York, NY, 2002; Lee et al., Critical Reviews in Therapeutic Drug Carrier Systems, 1991, page 92; Swinyard, Chapter 39 In: Remington's Pharmaceutical Sciences, 18th Ed., Gennaro, ed., Mack Publishing Co., Easton, Pa., 1990, pages 782-783; Muranishi, Critical Reviews in Therapeutic Drug Carrier Systems, 1990, 7, 1-33; Yamamoto et al., J. Pharm. Exp. Ther., 1992, 263, 25; Yamashita et al., J. Pharm. Sci., 1990, 79, 579-583).

[0663] Chelating agents, as used in connection with the present disclosure, can be defined as compounds that remove metallic ions from solution by forming complexes therewith, with the result that absorption of RNAi agents through the mucosa is enhanced. With regards to their use as penetration enhancers in the present disclosure, chelating agents have the added advantage of also serving as DNase inhibitors, as most characterized DNA nucleases require a divalent metal ion for catalysis and are thus inhibited by chelating agents (Jarrett, J. Chromatogr., 1993, 618, 315-339). Suitable chelating agents include but are not limited to disodium ethylenediaminetetraacetate (EDTA), citric acid, salicylates (e.g., sodium salicylate, 5-methoxysalicylate and homovanilate), N-acyl derivatives of collagen, laureth-9 and N-amino acyl derivatives of beta-diketones (enamines)(see e.g., Katdare, A. et al., Excipient development for pharmaceutical, biotechnology, and drug delivery, CRC Press, Danvers, M A, 2006; Lee et al., Critical Reviews in Therapeutic Drug Carrier Systems, 1991, page 92; Muranishi, Critical Reviews in Therapeutic Drug Carrier Systems, 1990, 7, 1-33; Buur et al., J. Control Rel., 1990, 14, 43-51).

[0664] As used herein, non-chelating non-surfactant penetration enhancing compounds can be defined as compounds that demonstrate insignificant activity as chelating agents or as surfactants but that nonetheless enhance absorption of RNAi agents through the alimentary mucosa (see e.g., Muranishi, Critical Reviews in Therapeutic Drug Carrier Systems, 1990, 7, 1-33). This class of penetration enhancers includes, for example, unsaturated cyclic ureas, 1-alkyl- and 1-alkenylazacyclo-alkanone derivatives (Lee et al., Critical Reviews in Therapeutic Drug Carrier Systems, 1991, page 92); and non-steroidal anti-inflammatory agents such as diclofenac sodium, indomethacin and phenylbutazone (Yamashita et al., J. Pharm. Pharmacol., 1987, 39, 621-626).

[0665] Agents that enhance uptake of RNAi agents at the cellular level can also be added to the pharmaceutical and other compositions of the present disclosure. For example, cationic lipids, such as lipofectin (Junichi et al, U.S. Pat. No. 5,705,188), cationic glycerol derivatives, and polycationic molecules, such as polylysine (WO 97/30731), are also known to enhance the cellular uptake of dsRNAs.

[0666] Other agents can be utilized to enhance the penetration of the administered nucleic acids, including glycols such as ethylene glycol and propylene glycol, pyrrols such as 2-pyrrol, azones, and terpenes such as limonene and menthone.

[0667] vi. Excipients

[0668] In contrast to a carrier compound, a “pharmaceutical carrier” or “excipient” is a pharmaceutically acceptable solvent, suspending agent or any other pharmacologically inert vehicle for delivering one or more nucleic acids to an animal. The excipient can be liquid or solid and is selected, with the planned manner of administration in mind, so as to provide for the desired bulk, consistency, etc., when combined with a nucleic acid and the other components of a given pharmaceutical composition. Typical pharmaceutical carriers include, but are not limited to, binding agents (e.g., pregelatinized maize starch, polyvinylpyrrolidone or hydroxypropyl methylcellulose, etc.); fillers (e.g., lactose and other sugars, microcrystalline cellulose, pectin, gelatin, calcium sulfate, ethyl cellulose, polyacrylates or calcium hydrogen phosphate, etc.); lubricants (e.g., magnesium stearate, talc, silica, colloidal silicon dioxide, stearic acid, metallic stearates, hydrogenated vegetable oils, corn starch, polyethylene glycols, sodium benzoate, sodium acetate, etc.); disintegrants (e.g., starch, sodium starch glycolate, etc.); and wetting agents (e.g., sodium lauryl sulphate, etc).

[0669] Pharmaceutically acceptable organic or inorganic excipients suitable for non-parenteral administration which do not deleteriously react with nucleic acids can also be used to formulate the compositions of the present disclosure. Suitable pharmaceutically acceptable carriers include, but are not limited to, water, salt solutions, alcohols, polyethylene glycols, gelatin, lactose, amylose, magnesium stearate, talc, silicic acid, viscous paraffin, hydroxymethylcellulose, polyvinylpyrrolidone and the like.

[0670] Formulations for topical administration of nucleic acids can include sterile and non-sterile aqueous solutions, non-aqueous solutions in common solvents such as alcohols, or solutions of the nucleic acids in liquid or solid oil bases. The solutions can also contain buffers, diluents and other suitable additives. Pharmaceutically acceptable organic or inorganic excipients suitable for non-parenteral administration which do not deleteriously react with nucleic acids can be used.

[0671] Suitable pharmaceutically acceptable excipients include, but are not limited to, water, salt solutions, alcohol, polyethylene glycols, gelatin, lactose, amylose, magnesium stearate, talc, silicic acid, viscous paraffin, hydroxymethylcellulose, polyvinylpyrrolidone and the like.

[0672] vii. Other Components

[0673] The compositions of the present disclosure can additionally contain other adjunct components conventionally found in pharmaceutical compositions, at their art-established usage levels. Thus, for example, the compositions can contain additional, compatible, pharmaceutically-active materials such as, for example, antipruritics, astringents, local anesthetics or anti-inflammatory agents, or can contain additional materials useful in physically formulating various dosage forms of the compositions of the present disclosure, such as dyes, flavoring agents, preservatives, antioxidants, opacifiers, thickening agents and stabilizers. However, such materials, when added, should not unduly interfere with the biological activities of the components of the compositions of the present disclosure. The formulations can be sterilized and, if desired, mixed with auxiliary agents, e.g., lubricants, preservatives, stabilizers, wetting agents, emulsifiers, salts for influencing osmotic pressure, buffers, colorings, flavorings or aromatic substances and the like which do not deleteriously interact with the nucleic acid(s) of the formulation.

[0674] Aqueous suspensions can contain substances which increase the viscosity of the suspension including, for example, sodium carboxymethylcellulose, sorbitol or dextran. The suspension can also contain stabilizers.

[0675] In some embodiments, pharmaceutical compositions featured in the disclosure include (a) one or more RNAi agents and (b) one or more agents which function by a non-RNAi mechanism and which are useful in treating a PRNP-associated disorder. Examples of such agents include, but are not lmited to SSRIs, venlafaxine, bupropion, and atypical antipsychotics.

[0676] Toxicity and therapeutic efficacy of such compounds can be determined by standard pharmaceutical procedures in cell cultures or experimental animals, e.g., for determining the LD₅₀ (the dose lethal to 50% of the population) and the EDso (the dose therapeutically effective in 50% of the population). The dose ratio between toxic and therapeutic effects is the therapeutic index and it can be expressed as the ratio LDso/EDso. Compounds that exhibit high therapeutic indices are preferred.

[0677] The data obtained from cell culture assays and animal studies can be used in formulating a range of dosage for use in humans. The dosage of compositions featured herein in the disclosure lies generally within a range of circulating concentrations that include the EDso with little or no toxicity. The dosage can vary within this range depending upon the dosage form employed and the route of administration utilized. For any compound used in the methods featured in the disclosure, the therapeutically effective dose can be estimated initially from cell culture assays. A dose can be formulated in animal models to achieve a circulating plasma concentration range of the compound or, when appropriate, of the polypeptide product of a target sequence (e.g., achieving a decreased concentration of the polypeptide) that includes the ICso (i.e., the concentration of the test compound which achieves a half-maximal inhibition of symptoms) as determined in cell culture. Such information can be used to more accurately determine useful doses in humans. Levels in plasma can be measured, for example, by high performance liquid chromatography.

[0678] In addition to their administration, as discussed above, the RNAi agents featured in the disclosure can be administered in combination with other known agents effective in treatment of pathological processes mediated by nucleotide repeat expression. In any event, the administering physician can adjust the amount and timing of RNAi agent administration on the basis of results observed using standard measures of efficacy known in the art or described herein.

### VII. Methods for Inhibiting PRNP Expression

[0679] The present disclosure also provides methods of inhibiting expression of a PRNP gene in a cell. The methods include contacting a cell with an RNAi agent, e.g., double stranded RNAi agent, in an amount effective to inhibit expression of PRNP in the cell, thereby inhibiting expression of PRNP in the cell. In certain embodiments of the disclosure, PRNP is inhibited preferentially in CNS (e.g., brain) cells. In some embodiments of the disclosure, PRNP is inhibited in liver cells (e.g., hepatocytes). In certain embodiments of the disclosure, PRNP is inhibited in CNS (e.g., brain) cells and in liver (e.g., hepatocytes) cells.

[0680] Contacting of a cell with a RNAi agent, e.g., a double stranded RNAi agent, may be done in vitro or in vivo. Contacting a cell in vivo with the RNAi agent includes contacting a cell or group of cells within a subject, e.g., a human subject, with the RNAi agent. Combinations of in vitro and in vivo methods of contacting a cell are also possible.

[0681] Contacting a cell may be direct or indirect, as discussed above. Furthermore, contacting a cell may be accomplished via a targeting ligand, including any ligand described herein or known in the art. In some embodiments, the targeting ligand is a carbohydrate moiety, e.g., a GalNAc ligand, or any other ligand that directs the RNAi agent to a site of interest.

[0682] The term “inhibiting,” as used herein, is used interchangeably with “reducing,” “silencing,” “downregulating,” “suppressing” and other similar terms, and includes any level of inhibition. In certain embodiments, a level of inhibition, e.g., for an RNAi agent of the instant disclosure, can be assessed in cell culture conditions, e.g., wherein cells in cell culture are transfected via Lipofectamine™-mediated transfection at a concentration in the vicinity of a cell of 10 nM or less, 1 nM or less, etc. Knockdown of a given RNAi agent can be determined via comparison of pre-treated levels in cell culture versus post-treated levels in cell culture, optionally also comparing against cells treated in parallel with a scrambled or other form of control RNAi agent. Knockdown in cell culture of, e.g., preferably 50% or more, can thereby be identified as indicative of “inhibiting” or “reducing”, “downregulating” or “suppressing”, etc. having occurred. It is expressly contemplated that assessment of targeted mRNA or encoded protein levels (and therefore an extent of “inhibiting”, etc. caused by a RNAi agent of the disclosure) can also be assessed in in vivo systems for the RNAi agents of the instant disclosure, under properly controlled conditions as described in the art.

[0683] The phrase “inhibiting expression of a PRNP gene” or “inhibiting expression of PRNP,” as used herein, includes inhibition of expression of any PRNP gene (such as, e.g., a mouse PRNP gene, a rat PRNP gene, a monkey PRNP gene, or a human PRNP gene) as well as variants or mutants of a PRNP gene that encode a PRNP protein. Thus, the PRNP gene may be a wild-type PRNP gene, a mutant PRNP gene, or a transgenic PRNP gene in the context of a genetically manipulated cell, group of cells, or organism.

[0684] “Inhibiting expression of a PRNP gene” includes any level of inhibition of a PRNP gene, e.g., at least partial suppression of the expression of a PRNP gene, such as an inhibition by at least 20%. In certain embodiments, inhibition is by at least 30%, at least 40%, preferably at least 50%, at least about 60%, at least 70%, at least about 80%, at least 85%, at least 90%, at least 95%, at least 96%, at least 97%, at least 98%, or at least 99%; or to below the level of detection of the assay method. In a preferred method, inhibition is measured at a 10 nM concentration of the siRNA using the luciferase assay provided in Example 1.

[0685] The expression of a PRNP gene may be assessed based on the level of any variable associated with PRNP gene expression, e.g., PRNP mIRNA level or PRNP protein level, or, for example, the level of PRNP deposition in areas of the brain associated with neuronal cell death.

[0686] Inhibition may be assessed by a decrease in an absolute or relative level of one or more of these variables compared with a control level. The control level may be any type of control level that is utilized in the art, e.g., a pre-dose baseline level, or a level determined from a similar subject, cell, or sample that is untreated or treated with a control (such as, e.g., buffer only control or inactive agent control).

[0687] In some embodiments of the methods of the disclosure, expression of a PRNP gene is inhibited by at least 20%, 30%, 40%, preferably at least 50%, 60%, 70%, 80%, 85%, 90%, or 95%, or to below the level of detection of the assay. In certain embodiments, the methods include a clinically relevant inhibition of expression of PRNP, e.g. as demonstrated by a clinically relevant outcome after treatment of a subject with an agent to reduce the expression of PRNP.

[0688] Inhibition of the expression of a PRNP gene may be manifested by a reduction of the amount of mTRNA expressed by a first cell or group of cells (such cells may be present, for example, in a sample derived from a subject) in which a PRNP gene is transcribed and which has or have been treated (e.g., by contacting the cell or cells with a RNAi agent of the disclosure, or by administering a RNAi agent of the disclosure to a subject in which the cells are or were present) such that the expression of a PRNP gene is inhibited, as compared to a second cell or group of cells substantially identical to the first cell or group of cells but which has not or have not been so treated (control cell(s) not treated with a RNAi agent or not treated with a RNAi agent targeted to the gene of interest). The degree of inhibition may be expressed in terms of:

$$\frac{( mRNA in control cells ) - ( mRNA in treated cells )}{( mRNA in control cells )} •100 \%$$

[0689] In other embodiments, inhibition of the expression of a PRNP gene may be assessed in terms of a reduction of a parameter that is functionally linked to a PRNP gene expression, e.g., PRNP protein expression. PRNP gene silencing may be determined in any cell expressing PRNP, either endogenous or heterologous from an expression construct, and by any assay known in the art.

[0690] Inhibition of the expression of a PRNP protein may be manifested by a reduction in the level of the PRNP protein that is expressed by a cell or group of cells (e.g., the level of protein expressed in a sample derived from a subject). As explained above, for the assessment ofITmRNA suppression, the inhibiton of protein expression levels in a treated cell or group of cells may similarly be expressed as a percentage of the level of protein in a control cell or group of cells.

[0691] A control cell or group of cells that may be used to assess the inhibition of the expression of a PRNP gene includes a cell or group of cells that has not yet been contacted with an RNAi agent of the disclosure. For example, the control cell or group of cells may be derived from an individual subject (e.g., a human or animal subject) prior to treatment of the subject with an RNAi agent.

[0692] The level of PRNP mRNA that is expressed by a cell or group of cells may be determined using any method known in the art for assessing mRNA expression. In one embodiment, the level of expression of PRNP in a sample is determined by detecting a transcribed polynucleotide, or portion thereof, e.g., mRNA of the PRNP gene. RNA may be extracted from cells using RNA extraction techniques including, for example, using acid phenol/guanidine isothiocyanate extraction (RNAzol B; Biogenesis), RNeasy™ RNA preparation kits (Qiagen®) or PAXgene (PreAnalytix, Switzerland). Typical assay formats utilizing ribonucleic acid hybridization include nuclear run-on assays, RT-PCR, RNase protection assays, northern blotting, in situ hybridization, and microarray analysis. Circulating PRNP mRNA may be detected using methods the described in WO2012/177906, the entire contents of which are hereby incorporated herein by reference.

[0693] In some embodiments, the level of expression of PRNP is determined using a nucleic acid probe. The term “probe”, as used herein, refers to any molecule that is capable of selectively binding to a specific PRNP nucleic acid or protein, or fragment thereof. Probes can be synthesized by one of skill in the art, or derived from appropriate biological preparations. Probes may be specifically designed to be labeled. Examples of molecules that can be utilized as probes include, but are not limited to, RNA, DNA, proteins, antibodies, and organic molecules.

[0694] Isolated mRNA can be used in hybridization or amplification assays that include, but are not limited to, Southern or northern analyses, polymerase chain reaction (PCR) analyses and probe arrays. One method for the determination of mRNA levels involves contacting the isolated mRNA with a nucleic acid molecule (probe) that can hybridize to PRNP mRNA. In one embodiment, the mRNA is immobilized on a solid surface and contacted with a probe, for example by running the isolated mRNA on an agarose gel and transferring the mRNA from the gel to a membrane, such as nitrocellulose. In an alternative embodiment, the probe(s) are immobilized on a solid surface and the mRNA is contacted with the probe(s), for example, in an Affymetrix® gene chip array. A skilled artisan can readily adapt known mRNA detection methods for use in determining the level of PRNP mRNA.

[0695] An alternative method for determining the level of expression of PRNP in a sample involves the process of nucleic acid amplification or reverse transcriptase (to prepare cDNA) of for example mRNA in the sample, e.g., by RT-PCR (the experimental embodiment set forth in Mullis, 1987, U.S. Pat. No. 4,683,202), ligase chain reaction (Barany (1991) Proc. Natl. Acad. Sci. USA 88:189-193), self sustained sequence replication (Guatelli et al. (1990) Proc. Natl. Acad. Sci. USA 87:1874-1878), transcriptional amplification system (Kwoh et al. (1989) Proc. Natl. Acad. Sci. USA 86:1173-1177), Q-Beta Replicase (Lizardi et al. (1988) Bio/Technology 6:1197), rolling circle replication (Lizardi et al., U.S. Pat. No. 5,854,033) or any other nucleic acid amplification method, followed by the detection of the amplified molecules using techniques well known to those of skill in the art. These detection schemes are especially useful for the detection of nucleic acid molecules if such molecules are present in very low numbers. In particular aspects of the disclosure, the level of expression of PRNP is determined by quantitative fluorogenic RT-PCR (i.e., the TaqMan™ System), by a Dual-Glo® Luciferase assay, or by other art-recognized method for measurement of PRNP expression or mRNA level.

[0696] The expression level of PRNP mRNA may be monitored using a membrane blot (such as used in hybridization analysis such as northern, Southern, dot, and the like), or microwells, sample tubes, gels, beads or fibers (or any solid support comprising bound nucleic acids). See U.S. Pat. Nos. 5,770,722, 5,874,219, 5,744,305, 5,677,195 and 5,445,934, which are incorporated herein by reference. The determination of PRNP expression level may also comprise using nucleic acid probes in solution.

[0697] In some embodiments, the level of mRNA expression is assessed using branched DNA (bDNA) assays or real time PCR (qPCR). The use of this PCR method is described and exemplified in the Examples presented herein. Such methods can also be used for the detection of PRNP nucleic acids.

[0698] The level of PRNP protein expression may be determined using any method known in the art for the measurement of protein levels. Such methods include, for example, electrophoresis, capillary electrophoresis, high performance liquid chromatography (HPLC), thin layer chromatography (TLC), hyperdiffusion chromatography, fluid or gel precipitin reactions, absorption spectroscopy, a colorimetric assays, spectrophotometric assays, flow cytometry, immunodiffusion (single or double), immunoelectrophoresis, western blotting, radioimmunoassay (RIA), enzyme-linked immunosorbent assays (ELISAs), immunofluorescent assays, electrochemiluminescence assays, and the like. Such assays can also be used for the detection of proteins indicative of the presence or replication of PRNP proteins.

[0699] In some embodiments, the efficacy of the methods of the disclosure in the treatment of a PRNP-related disease is assessed by a decrease in PRNP mRNA level (e.g, by assessment of a CSF sample for PRNP level, by brain biopsy, or otherwise).

[0700] In some embodiments, the efficacy of the methods of the disclosure in the treatment of a PRNP-related disease is assessed by a decrease in PRNP mRNA level (e.g, by assessment of a liver sample for PRNP level, by biopsy, or otherwise).

[0701] In some embodiments of the methods of the disclosure, the RNAi agent is administered to a subject such that the RNAi agent is delivered to a specific site within the subject. The inhibition of expression of PRNP may be assessed using measurements of the level or change in the level of PRNP mRNA or PRNP protein in a sample derived from a specific site within the subject, e.g., CNS cells. In certain embodiments, the methods include a clinically relevant inhibition of expression of PRNP, e.g. as demonstrated by a clinically relevant outcome after treatment of a subject with an agent to reduce the expression of PRNP.

[0702] As used herein, the terms detecting or determining a level of an analyte are understood to mean performing the steps to determine if a material, e.g., protein, RNA, is present. As used herein, methods of detecting or determining include detection or determination of an analyte level that is below the level of detection for the method used.

### VIII. Methods of Treating or Preventing PRNP-Associated Diseases

[0703] The present disclosure also provides methods of using a RNAi agent of the disclosure or a composition containing a RNAi agent of the disclosure to reduce or inhibit PRNP expression in a cell. The methods include contacting the cell with a dsRNA of the disclosure and maintaining the cell for a time sufficient to obtain degradation of the mRNA transcript of a PRNP gene, thereby inhibiting expression of the PRNP gene in the cell. Reduction in gene expression can be assessed by any methods known in the art. For example, a reduction in the expression of PRNP may be determined by determining the mRNA expression level of PRNP using methods routine to one of ordinary skill in the art, e.g., northern blotting, qRT-PCR; by determining the protein level of PRNP using methods routine to one of ordinary skill in the art, such as western blotting, immunological techniques.

[0704] In the methods of the disclosure the cell may be contacted in vitro or in vivo, i.e., the cell may be within a subject.

[0705] A cell suitable for treatment using the methods of the disclosure may be any cell that expresses a PRNP gene. A cell suitable for use in the methods of the disclosure may be a mammalian cell, e.g., a primate cell (such as a human cell or a non-human primate cell, e.g., a monkey cell or a chimpanzee cell), a non-primate cell (such as a rat cell, or a mouse cell. In one embodiment, the cell is a human cell, e.g., a human CNS cell. In one embodiment, the cell is a human cell, e.g., a human liver cell. In one embodiment, the cell is a human cell, e.g., a human CNS cell or a human liver cell.

[0706] PRNP expression is inhibited in the cell by at least about 30, 40, 50, 55, 60, 65, 70, 75, 80, 85, 90, 95, 96, 97, 98, 99, or about 100%, i.e., to below the level of detection. In preferred embodiments, PRNP expression is inhibited by at least 50%.

[0707] The in vivo methods of the disclosure may include administering to a subject a composition containing a RNAi agent, where the RNAi agent includes a nucleotide sequence that is complementary to at least a part of an RNA transcript of the PRNP gene of the mammal to be treated. When the organism to be treated is a mammal such as a human, the composition can be administered by any means known in the art including, but not limited to oral, intraperitoneal, or parenteral routes, including intracranial (e.g., intraventricular, intraparenchymal, and intrathecal), intravenous, intramuscular, subcutaneous, transdermal, airway (aerosol), nasal, rectal, and topical (including buccal and sublingual) administration. In certain embodiments, the compositions are administered by intravenous infusion or injection. In certain embodiments, the compositions are administered by subcutaneous injection. In certain embodiments, the compositions are administered by intrathecal injection.

[0708] In some embodiments, the administration is via a depot injection. A depot injection may release the RNAi agent in a consistent way over a prolonged time period. Thus, a depot injection may reduce the frequency of dosing needed to obtain a desired effect, e.g., a desired inhibition of PRNP, or a therapeutic or prophylactic effect. A depot injection may also provide more consistent serum concentrations. Depot injections may include subcutaneous injections or intramuscular injections. In preferred embodiments, the depot injection is a subcutaneous injection.

[0709] In some embodiments, the administration is via a pump. The pump may be an external pump or a surgically implanted pump. In certain embodiments, the pump is a subcutaneously implanted osmotic pump. In other embodiments, the pump is an infusion pump. An infusion pump may be used for intracranial, intravenous, subcutaneous, arterial, or epidural infusions. In preferred embodiments, the infusion pump is a subcutaneous infusion pump. In other embodiments, the pump is a surgically implanted pump that delivers the RNAi agent to the CNS.

[0710] The mode of administration may be chosen based upon whether local or systemic treatment is desired and based upon the area to be treated. The route and site of administration may be chosen to enhance targeting.

[0711] In one aspect, the present disclosure also provides methods for inhibiting the expression of a PRNP gene in a mammal. The methods include administering to the mammal a composition comprising a dsRNA that targets a PRNP gene in a cell of the mammal and maintaining the mammal for a time sufficient to obtain degradation of the mRNA transcript of the PRNP gene, thereby inhibiting expression of the PRNP gene in the cell. Reduction in gene expression can be assessed by any methods known it the art and by methods, e.g. qRT-PCR, described herein. Reduction in protein production can be assessed by any methods known it the art and by methods, e.g. ELISA, described herein. In one embodiment, a CNS biopsy sample or a cerebrospinal fluid (CSF) sample serves as the tissue material for monitoring the reduction in PRNP gene or protein expression (or of a proxy therefore).

[0712] The present disclosure further provides methods of treatment of a subject in need thereof. The treatment methods of the disclosure include administering an RNAi agent of the disclosure to a subject, e.g., a subject that would benefit from inhibition of PRNP expression, in a therapeutically effective amount of a RNAi agent targeting a PRNP gene or a pharmaceutical composition comprising a RNAi agent targeting a PRNP gene.

[0713] In addition, the present disclosure provides methods of preventing, treating or inhibiting the progression of a PRNP-associated disease or disorder, such as prion diseases, e.g., a genetic prion disease, e.g., familial Creutzfeldt-Jakob disease (CJD), Gerstmann-Straussler-Scheinker syndrome (GSS), and fatal familial insomnia (FFI); a sporadic prion disease, e.g., sporadic Creutzfeldt-Jakob disease, Sporadic Fatal Insomnia (sFI), and Variably Proteinase-Sensitive Prionopathy (VPSPr), or an acquired prion disease, e.g., Iatrogenic CJD (iCJD), Kuru, and Variant CJD (vCJD). The methods include administering to the subject a therapeutically effective amount of any of the RNAi agent, e.g., dsRNA agents, or the pharmaceutical composition provided herein, thereby preventing, treating, or inhibiting the progression of the PRNP-associated disease or disorder in the subject.

[0714] An RNAi agent of the disclosure may be administered as a “free RNAi agent.” A free RNAi agent is administered in the absence of a pharmaceutical composition. The naked RNAi agent may be in a suitable buffer solution. The buffer solution may comprise acetate, citrate, prolamine, carbonate, or phosphate, or any combination thereof. In one embodiment, the buffer solution is phosphate buffered saline (PBS). The pH and osmolarity of the buffer solution containing the RNAi agent can be adjusted such that it is suitable for administering to a subject.

[0715] Alternatively, an RNAi agent of the disclosure may be administered as a pharmaceutical composition, such as a dsRNA liposomal formulation.

[0716] Subjects that would benefit from a reduction or inhibition of PRNP gene expression are those having a PRNP-associated disease.

[0717] The disclosure further provides methods for the use of a RNAi agent or a pharmaceutical composition thereof, e.g., for treating a subject that would benefit from reduction or inhibition of PRNP expression, e.g., a subject having a PRNP-associated disorder, in combination with other pharmaceuticals or other therapeutic methods, e.g., with known pharmaceuticals or known therapeutic methods, such as, for example, those which are currently employed for treating these disorders. For example, in certain embodiments, an RNAi agent targeting PRNP is administered in combination with, e.g., an agent useful in treating a PRNP-associated compldisorder as described elsewhere herein or as otherwise known in the art. For example, additional agents and treatments suitable for treating a subject that would benefit from reducton in PRNP expression, e.g., a subject having a PRNP-associated disorder, may include agents currently used to treat symptoms of PRNP. The RNAi agent and additional therapeutic agents may be administered at the same time or in the same combination, e.g., intrathecally, or the additional therapeutic agent can be administered as part of a separate composition or at separate times or by another method known in the art or described herein.

[0718] Exemplary additional therapeutics and treatments include, for example, sedatives, antidepressants, clonazepam, sodium valproate, opiates, antiepileptic drugs, cholinesterase inhibitors, memantine, benzodiazepines, levodopa, COMT inhibitors (e.g., tolcapone and entacapone), dopamine agonists (e.g., bromocriptine, pergolide, pramipexole, ropinirole, piribedil, cabergoline, apomorphine and lisuride), MAO-B inhibitors (e.g., safinamide, selegiline and rasagiline), amantadine, an anticholinergic, modafinil, pimavanserin, doxepin, rasagline, an antipsychotic, an atypical antipsychotic (e.g., amisulpride, olanzapine, risperidone. and clozapine), riluzole, edaravone, deep brain stimulation, non-invasive ventilation (NIV), invasive ventilation physical therapy, occupational therapy, speech therapy, dietary changes and swallowing technique a feeding tube, a PEG tube, probiotics, and psychological therapy.

[0719] In one embodiment, the method includes administering a composition featured herein such that expression of the target PRNP gene is decreased, for at least one month. In some embodiments, expression is decreased for at least 2 months, or 6 months.

[0720] Preferably, the RNAi agents useful for the methods and compositions featured herein specifically target RNAs (primary or processed) of the target PRNP gene. Compositions and methods for inhibiting the expression of these genes using RNAi agents can be prepared and performed as described herein.

[0721] Administration of the dsRNA according to the methods of the disclosure may result in a reduction of the severity, signs, symptoms, or markers of such diseases or disorders in a patient with a PRNP-associated disorder. By “reduction” in this context is meant a statistically significant or clinically significant decrease in such level. The reduction can be, for example, at least 5%, 10%, 15%, 20%, 25%, 30%, 35%, 40%, 45%, 50%, 55%, 60%, 65%, 70%, 75%, 80%, 85%, 90%, 95%, or about 100%.

[0722] Efficacy of treatment or prevention of disease can be assessed, for example by measuring disease progression, disease remission, symptom severity, reduction in pain, quality of life, dose of a medication required to sustain a treatment effect, level of a disease marker or any other measurable parameter appropriate for a given disease being treated or targeted for prevention. It is well within the ability of one skilled in the art to monitor efficacy of treatment or prevention by measuring any one of such parameters, or any combination of parameters. For example, efficacy of treatment of a PRNP-associated disorder may be assessed, for example, by periodic monitoring of a subject's cognition, learning, or memory. Comparisons of the later readings with the initial readings provide a physician an indication of whether the treatment is effective. It is well within the ability of one skilled in the art to monitor efficacy of treatment or prevention by measuring any one of such parameters, or any combination of parameters. In connection with the administration of a RNAi agent targeting PRNP or pharmaceutical composition thereof, “effective against” a PRNP-associated disorder indicates that administration in a clinically appropriate manner results in a beneficial effect for at least a statistically significant fraction of patients, such as an improvement of symptoms, a cure, a reduction in disease, extension of life, improvement in quality of life, or other effect generally recognized as positive by medical doctors familiar with treating PRNP-associated disorders and the related causes.

[0723] A treatment or preventive effect is evident when there is a statistically significant improvement in one or more parameters of disease status, or by a failure to worsen or to develop symptoms where they would otherwise be anticipated. As an example, a favorable change of at least 10% in a measurable parameter of disease, and preferably at least 20%, 30%, 40%, 50%, or more can be indicative of effective treatment. Efficacy for a given RNAi agent drug or formulation of that drug can also be judged using an experimental animal model for the given disease as known in the art. When using an experimental animal model, efficacy of treatment is evidenced when a statistically significant reduction in a marker or symptom is observed.

[0724] Alternatively, the efficacy can be measured by a reduction in the severity of disease as determined by one skilled in the art of diagnosis based on a clinically accepted disease severity grading scale. Any positive change resulting in e.g., lessening of severity of disease measured using the appropriate scale, represents adequate treatment using a RNAi agent or RNAi agent formulation as described herein.

[0725] Subjects can be administered a therapeutic amount of dsRNA, such as about 0.01 mg/kg to about 200 mg/kg.

[0726] The RNAi agent can be administered intrathecally, intraventricularly, or by intravenous infusion over a period of time, on a regular basis. In certain embodiments, after an initial treatment regimen, the treatments can be administered on a less frequent basis. Administration of the RNAi agent can reduce PRNP levels, e.g., in a cell, tissue, blood, CSF sample or other compartment of the patient by at least 20%, 30%, 40%, 50%, 55%, 60%, 65%, 70,% 75%, 80%, 85%, 90%, 95%, 96%, 97%, 98%, or at least about 99% or more. In a preferred embodiment, administration of the RNAi agent can reduce PRNP levels, e.g., in a cell, tissue, blood, CSF sample or other compartment of the patient by at least 50%.

[0727] Before administration of a full dose of the RNAi agent, patients can be administered a smaller dose, such as a 5% infusion reaction, and monitored for adverse effects, such as an allergic reaction. In another example, the patient can be monitored for unwanted immunostimulatory effects, such as increased cytokine (e.g., TNF-alpha or INF-alpha) levels.

[0728] Alternatively, the RNAi agent can be administered subcutaneously, i.e., by subcutaneous injection. One or more injections may be used to deliver the desired, e.g., monthly dose of RNAi agent to a subject. The injections may be repeated over a period of time. The administration may be repeated on a regular basis. In certain embodiments, after an initial treatment regimen, the treatments can be administered on a less frequent basis. A repeat-dose regimine may include administration of a therapeutic amount of RNAi agent on a regular basis, such as monthly or extending to once a quarter, twice per year, once per year. In certain embodiments, the RNAi agent is administered about once per month to about once per quarter (i.e., about once every three months).

### IX. Kits

[0729] In certain aspects, the instant disclosure provides kits that include a suitable container containing a pharmaceutical formulation of a siRNA compound, e.g., a double-stranded siRNA compound, or ssiRNA compound, (e.g., a precursor, e.g., a larger siRNA compound which can be processed into a ssiRNA compound, or a DNA which encodes an siRNA compound, e.g., a double-stranded siRNA compound, or ssiRNA compound, or precursor thereof).

[0730] Such kits include one or more dsRNA agent(s) and instructions for use, e.g., instructions for administering a prophylactically or therapeutically effective amount of a dsRNA agent(s). The dsRNA agent may be in a vial or a pre-filled syringe. The kits may optionally further comprise means for administering the dsRNA agent (e.g., an injection device, such as a pre-filled syringe), or means for measuring the inhibition of PRNP (e.g., means for measuring the inhibition of PRNP mRNA, PRNP protein, and/or PRNP activity). Such means for measuring the inhibition of PRNP may comprise a means for obtaining a sample from a subject, such as, e.g., a CSF and/or plasma sample. The kits of the invention may optionally further comprise means for determining the therapeutically effective or prophylactically effective amount.

[0731] In certain embodiments the individual components of the pharmaceutical formulation may be provided in one container, e.g., a vial or a pre-filled syringe. Alternatively, it may be desirable to provide the components of the pharmaceutical formulation separately in two or more containers, e.g., one container for a siRNA compound preparation, and at least another for a carrier compound. The kit may be packaged in a number of different configurations such as one or more containers in a single box. The different components can be combined, e.g., according to instructions provided with the kit. The components can be combined according to a method described herein, e.g., to prepare and administer a pharmaceutical composition. The kit can also include a delivery device.

[0732] Unless otherwise defined, all technical and scientific terms used herein have the same meaning as commonly understood by one of ordinary skill in the art to which this invention belongs. Although methods and materials similar or equivalent to those described herein can be used in the practice or testing of the RNAi agents and methods featured in the invention, suitable methods and materials are described below. All publications, patent applications, patents, and other references mentioned herein are incorporated by reference in their entirety. In case of conflict, the present specification, including definitions, will control. In addition, the materials, methods, and examples are illustrative only and not intended to be limiting.

[0733] An inforrmal Sequence Listing is filed herewith and forms part of the specification as filed.

### EXAMPLES

### Example 1. RNAi Agent Design, Synthesis, Selection, and In Vitro Evaluation

[0734] This Example describes methods for the design, synthesis, selection, and in vitro evaluation of PRNP RNAi agents.

### Source of Reagents

[0735] Where the source of a reagent is not specifically given herein, such reagent can be obtained from any supplier of reagents for molecular biology at a quality/purity standard for application in molecular biology.

### Bioinformatics

[0736] siRNAs targeting the human prion protein (PRNP) gene (human: NCBI refseqID NM_000311.5; NCBI GeneID: 5261) were designed using custom R and Python scripts. The human NM_000311.5 REFSEQ mRNA, has a length of 2435 bases.

[0737] Detailed lists of the unmodified PRNP sense and antisense strand nucleotide sequences are shown in Table 2. Detailed lists of the modified PRNP sense and antisense strand nucleotide sequences are shown in Table 3.

[0738] It is to be understood that, throughout the application, a duplex name without a decimal is equivalent to a duplex name with a decimal which merely references the batch number of the duplex. For example, AD-564727 is equivalent to AD-564727.1.

siRNA Synthesis

[0739] siRNAs were synthesized and annealed using routine methods known in the art. Briefly, siRNA sequences were synthesized on a 1 μmol scale using a Mermade 192 synthesizer (BioAutomation) with phosphoramidite chemistry on solid supports. The solid support was controlled pore glass (500-1000 Å) loaded with a custom GalNAc ligand (3′-GalNAc conjugates), universal solid support (AM Chemicals), or the first nucleotide of interest. Ancillary synthesis reagents and standard 2-cyanoethyl phosphoramidite monomers (2′-deoxy-2′-fluoro, 2′-O-methyl, RNA, DNA) were obtained from Thermo-Fisher (Milwaukee, WI), Hongene (China), or Chemgenes (Wilmington, MA, USA). Additional phosphoramidite monomers were procured from commercial suppliers, prepared in-house, or procured using custom synthesis from various CMOs. Phosphoramidites were prepared at a concentration of 100 mM in either acetonitrile or 9:1 acetonitrile:DMF and were coupled using 5-Ethylthio-1H-tetrazole (ETT, 0.25 M in acetonitrile) with a reaction time of 400 s. Phosphorothioate linkages were generated using a 100 mM solution of 3-((Dimethylamino-methylidene) amino)-3H-1,2,4-dithiazole-3-thione (DDTT, obtained from Chemgenes (Wilmington, MA, USA)) in anhydrous acetonitrile/pyridine (9:1 v/v). Oxidation time was 5 minutes. All sequences were synthesized with final removal of the DMT group (“DMT-Off”).

[0740] Upon completion of the solid phase synthesis, solid-supported oligoribonucleotides were treated with 300 μL of Methylamine (40% aqueous) at room temperature in 96 well plates for approximately 2 hours to afford cleavage from the solid support and subsequent removal of all additional base-labile protecting groups. For sequences containing any natural ribonucleotide linkages (2′-OH) protected with a tert-butyl dimethyl silyl (TBDMS) group, a second deprotection step was performed using TEA.3HF (triethylamine trihydrofluoride). To each oligonucleotide solution in aqueous methylamine was added 200 μL of dimethyl sulfoxide (DMSO) and 300 μL TEA.3HF and the solution was incubated for approximately 30 mins at 60° C. After incubation, the plate was allowed to come to room temperature and crude oligonucleotides were precipitated by the addition of 1 mL of 9:1 acetontrile:ethanol or 1:1 ethanol:isopropanol. The plates were then centrifuged at 4° C. for 45 mins and the supernatant carefully decanted with the aid of a multichannel pipette. The oligonucleotide pellet was resuspended in 20 mM NaOAc and subsequently desalted using a HiTrap size exclusion column (5 mL, GE Healthcare) on an Agilent LC system equipped with an autosampler, UV detector, conductivity meter, and fraction collector. Desalted samples were collected in 96 well plates and then analyzed by LC-MS and UV spectrometry to confirm identity and quantify the amount of material, respectively.

[0741] Duplexing of single strands was performed on a Tecan liquid handling robot. Sense and antisense single strands were combined in an equimolar ratio to a final concentration of 10 μM in 1×PBS in 96 well plates, the plate sealed, incubated at 100° C. for 10 minutes, and subsequently allowed to return slowly to room temperature over a period of 2-3 hours. The concentration and identity of each duplex was confirmed and then subsequently utilized for in vitro screening assays.

### In Vitro Screening Assays

### Cell Culture and Transfections

[0742] Transfection experiments are performed in human neuroblastoma BE(2)C cells (ATCC CRL-2268) with EMEM:F12 media (Gibco catalog no. 11765054) and mouse neuroblastoma Neuro2A cells (ATCC CCL-131) with EMEM media. Cells are transfected by adding 4.9 μL of Opti-MEM plus 0.1 μL of RNAiMAX per well (Invitrogen, Carlsbad CA. cat #13778-150) to 5 μL of siRNA duplexes per well, with 4 replicates of each siRNA duplex, into a 384-well plate, and incubated at room temperature for 15 minutes. Forty μL of MEDIA containing ˜5×10³ cells are then added to the siRNA mixture. Cells are incubated for 24 hours prior to RNA purification. Experiments are performed at 50 nM, 10 nM, lnM and 0.1 nM.

Total RNA Isolation Using DYNABEADS mRNA Isolation Kit

[0743] RNA is isolated using an automated protocol on a BioTek-EL406 platform using DYNABEADs (Invitrogen, cat #61012). Briefly, 70 μL of Lysis/Binding Buffer and 10 μL of lysis buffer containing 3 μL of magnetic beads are added to the plate with cells. Plates are incubated on an electromagnetic shaker for 10 minutes at room temperature and then magnetic beads are captured and the supernatant is removed. Bead-bound RNA are then washed 2 times with 150 μL Wash Buffer A and once with Wash Buffer B. Beads are then washed with 150 μL Elution Buffer, re-captured and supernatant removed.

cDNA Synthesis Using ABI High Capacity cDNA Reverse Transcription Kit (Applied Biosystems, Foster City, CA, Cat #4368813)

[0744] Ten μL of a master mix containing 1 μL 10× Buffer, 0.4 μL 25×dNTPs, 1 μL 10× Random primers, 0.5 μL Reverse Transcriptase, 0.5 μL RNase inhibitor and 6.6 μL of H₂O per reaction is added to RNA isolated above. Plates are sealed, mixed, and incubated on an electromagnetic shaker for 10 minutes at room temperature, followed by 2 hour incubation at 37° C.

### Real Time PCR

[0745] Two μL of cDNA are added to a master mix containing 0.5 μL of human or mouse GAPDH TaqMan Probe (ThermoFisher cat 4352934E or 4351309) and 0.5 μL of appropriate PRNP probe (commercially available, e.g., from Thermo Fisher) and 5 μL Lightcycler 480 probe master mix (Roche Cat #04887301001) per well in a 384 well plates (Roche cat #04887301001). Real time PCR is done in a LightCycler480 Real Time PCR system (Roche). Each duplex is tested with N=4 and data were normalized to cells transfected with a non-targeting control siRNA. To calculate relative fold change, real time data are analyzed using the ΔΔCt method and normalized to assays performed with cells transfected with a non-targeting control siRNA.

[0746] The results of the transfection experiments of the dsRNA agents listed in Tables 2 and 3 in BE2C cells are shown in Table 4, and the results of the transfection experiments of the dsRNA agents listed in Tables 2 and 3 in Neuro2a are shown in Table 5.

TABLE 1
Abbreviations of nucleotide monomers used in nucleic acid sequence representation. It will be
understood that these monomers, when present in an oligonucleotide, are mutually linked by 5′-3′-
phosphodiester bonds; and it is understood that when the nucleotide contains a 2′-fluoro modification,
then the fluoro replaces the hydroxy at that position in the parent nucleotide (i.e., it is a 2′-deoxy-2′-
fluoronucleotide).

| Abbreviation | Nucleotide(s) |
|---|---|
| A | Adenosine-3′-phosphate |
| Ab | beta-L-adenosine-3′-phosphate |
| Abs | beta-L-adenosine-3′-phosphorothioate |
| Af | 2′-fluoroadenosine-3′-phosphate |
| Afs | 2′-fluoroadenosine-3′-phosphorothioate |
| As | adenosine-3′-phosphorothioate |
| C | cytidine-3′-phosphate |
| Cb | beta-L-cytidine-3′-phosphate |
| Cbs | beta-L-cytidine-3′-phosphorothioate |
| Cf | 2′-fluorocytidine-3′-phosphate |
| Cfs | 2′-fluorocytidine-3′-phosphorothioate |
| Cs | cytidine-3′-phosphorothioate |
| G | guanosine-3′-phosphate |
| Gb | beta-L-guanosine-3′-phosphate |
| Gbs | beta-L-guanosine-3′-phosphorothioate |
| Gf | 2′-fluoroguanosine-3′-phosphate |
| Gfs | 2′-fluoroguanosine-3′-phosphorothioate |
| Gs | guanosine-3′-phosphorothioate |
| T | 5′-methyluridine-3′-phosphate |
| Tf | 2′-fluoro-5-methyluridine-3′-phosphate |
| Tfs | 2′-fluoro-5-methyluridine-3′-phosphorothioate |
| Ts | 5-methyluridine-3′-phosphorothioate |
| U | Uridine-3′-phosphate |
| Uf | 2′-fluorouridine-3′-phosphate |
| Ufs | 2′-fluorouridine-3′-phosphorothioate |
| Us | uridine-3′-phosphorothioate |
| N | any nucleotide, modified or unmodified |
| a | 2′-O-methyladenosine-3′-phosphate |
| as | 2′-O-methyladenosine-3′-phosphorothioate |
| c | 2′-O-methylcytidine-3′-phosphate |
| cs | 2′-O-methylcytidine-3′-phosphorothioate |
| g | 2′-O-methylguanosine-3′-phosphate |
| gs | 2′-O-methylguanosine-3′-phosphorothioate |
| t | 2′-O-methyl-5-methyluridine-3′-phosphate |
| ts | 2′-O-methyl-5-methyluridine-3′-phosphorothioate |
| u | 2′-O-methyluridine-3′-phosphate |
| us | 2′-O-methyluridine-3′-phosphorothioate |
| s | phosphorothioate linkage |
| L96 | N-[tris(GalNAc-alkyl)-amidodecanoyl)]-4-hydroxyprolinol |
| | (Hyp-(GalNAc-alkyl)3) |
| | [chemical structure] |
| Y34 | 2-hydroxymethyl-tetrahydrofurane-4-methoxy-3-phosphate (abasic 2′-OMe |
| | furanose) |
| | [chemical structure] |
| Y44 | inverted abasic DNA (2-hydroxymethyl-tetrahydrofurane-5-phosphate) |
| | [chemical structure] |
| L10 | N-(cholesterylcarboxamidocaproyl)-4-hydroxyprolinol (Hyp-C6-Chol) |
| | [chemical structure] |
| (Agn) | Adenosine-glycol nucleic acid (GNA) S-Isomer |
| (Cgn) | Cytidine-glycol nucleic acid (GNA) S-Isomer |
| (Ggn) | Guanosine-glycol nucleic acid (GNA) S-Isomer |
| (Tgn) | Thymidine-glycol nucleic acid (GNA) S-Isomer |
| P | Phosphate |
| VP | Vinyl-phosphonate |
| dA | 2′-deoxyadenosine-3′-phosphate |
| dAs | 2′-deoxyadenosine-3′-phosphorothioate |
| dC | 2′-deoxycytidine-3′-phosphate |
| dCs | 2′-deoxycytidine-3′-phosphorothioate |
| dG | 2′-deoxyguanosine-3`-phosphate |
| dGs | 2`-deoxyguanosine-3′-phosphorothioate |
| dT | 2′-deoxythymidine-3′-phosphate |
| dTs | 2′-deoxythymidine-3′-phosphorothioate |
| dU | 2′-deoxyuridine |
| dUs | 2′-deoxyuridine-3′-phosphorothioate |
| (C2p) | cytidine-2′-phosphate |
| (G2p) | guanosine-2′-phosphate |
| (U2p) | uridine-2′-phosphate |
| (A2p) | adenosine-2 -phosphate |
| (Ahd) | 2′-O-hexadecyl-adenosine-3′-phosphate |
| (Ahds) | 2′-O-hexadecyl-adenosine-3′-phosphorothioate |
| (Chd) | 2′-O-hexadecyl-cytidine-3′-phosphate |
| (Chds) | 2′-O-hexadecyl-cytidine-3′-phosphorothioate |
| (Ghd) | 2′-O-hexadecyl-guanosine-3′-phosphate |
| (Ghds) | 2′-O-hexadecyl-guanosine-3′-phosphorothioate |
| (Uhd) | 2′-O-hexadecyl-uridine-3′-phosphate |
| (Uhds) | 2′-O-hexadecyl-uridine-3′-phosphorothioate |
| s | phosphorothioate |

TABLE 2
Unmodified Sense and Antisense Strand Sequences of PRNP dsRNA Agents

| | | SEQ | | | SEQ | |
|---|---|---|---|---|---|---|
| | Sense Sequence | ID | Range in | Antisense Sequence | ID | Range in |
| Duplex Name | 5′ to 3′ | NO: | NM_000311.5 | 5′ to 3′ | NO: | NM_000311.5 |
| AD-1071792.1 | CCUAGCAGAUAUGUAUUACUA | 13 | 2036-2056 | UAGUAAUACAUAUCUGCUAGGUG | 14 | 2034-2056 |
| AD-1071769.1 | CCCUGAAUUGUUUGAUAUUGA | 15 | 2013-2033 | UCAAUAUCAAACAAUUCAGGGAA | 16 | 2011-2033 |
| AD-1071773.1 | GAAUUGUUUGAUAUUGUCACA | 17 | 2017-2037 | UGUGACAAUAUCAAACAAUUCAG | 18 | 2015-2037 |
| AD-1071718.1 | GGAGAUGACAGAAAUAUGAUA | 19 | 1940-1960 | UAUCAUAUUUCUGUCAUCUCCAA | 20 | 1938-1960 |
| AD-1071870.1 | UUAGGAGUUUUGUUUAGAGCA | 21 | 2145-2165 | UGCUCUAAACAAAACUCCUAAGU | 22 | 2143-2165 |
| AD-1071904.1 | GUGUCUAAUGCAUUAACUUUA | 23 | 2179-2199 | UAAAGUUAAUGCAUUAGACACUU | 24 | 2177-2199 |
| AD-1071789.1 | UCACCUAGCAGAUAUGUAUUA | 25 | 2033-2053 | UAAUACAUAUCUGCUAGGUGACA | 26 | 2031-2053 |
| AD-1071671.1 | CAUAGUUUCUGUAAUUGGCUA | 27 | 1875-1895 | UAGCCAAUUACAGAAACUAUGAA | 28 | 1873-1895 |
| AD-1071628.1 | AUUUCUGUCUCAUAAUUGUCA | 29 | 1832-1852 | UGACAAUUAUGAGACAGAAAUAA | 30 | 1830-1852 |
| AD-1071865.1 | CAGACUUAGGAGUUUUGUUUA | 31 | 2140-2160 | UAAACAAAACUCCUAAGUCUGUC | 32 | 2138-2160 |
| AD-1071670.1 | UCAUAGUUUCUGUAAUUGGCA | 33 | 1874-1894 | UGCCAAUUACAGAAACUAUGAAC | 34 | 1872-1894 |
| AD-1071901.1 | GAAGUGUCUAAUGCAUUAACA | 35 | 2176-2196 | UGUUAAUGCAUUAGACACUUCAG | 36 | 2174-2196 |
| AD-1071837.1 | CACUUUGUGAGUAUUCUAUGA | 37 | 2081-2101 | UCAUAGAAUACUCACAAAGUGCA | 38 | 2079-2101 |
| AD-1071929.1 | GGUACUGAAUACUUAAUAUGA | 39 | 2204-2224 | UCAUAUUAAGUAUUCAGUACCUU | 40 | 2202-2224 |
| AD-1071827.1 | UAUUGGCUUGCACUUUGUGAA | 41 | 2071-2091 | UUCACAAAGUGCAAGCCAAUAAU | 42 | 2069-2091 |
| AD-1071923.1 | UUGUAAGGUACUGAAUACUUA | 43 | 2198-2218 | UAAGUAUUCAGUACCUUACAAAA | 44 | 2196-2218 |
| AD-1071834.1 | UUGCACUUUGUGAGUAUUCUA | 45 | 2078-2098 | UAGAAUACUCACAAAGUGCAAGC | 46 | 2076-2098 |
| AD-1071984.1 | UGUGCACUGAAUCGUUUCAUA | 47 | 2259-2279 | UAUGAAACGAUUCAGUGCACAUU | 48 | 2257-2279 |
| AD-1071629.1 | UUUCUGUCUCAUAAUUGUCAA | 49 | 1833-1853 | UUGACAAUUAUGAGACAGAAAUA | 50 | 1831-1853 |
| AD-1071668.1 | GUUCAUAGUUUCUGUAAUUGA | 51 | 1872-1892 | UCAAUUACAGAAACUAUGAACUU | 52 | 1870-1892 |
| AD-1070449.1 | CGUUACUAUCGUGAAAACAUA | 53 | 509-529 | UAUGUUUUCACGAUAGUAACGGU | 54 | 507-529 |
| AD-1071836.1 | GCACUUUGUGAGUAUUCUAUA | 55 | 2080-2100 | UAUAGAAUACUCACAAAGUGCAA | 56 | 2078-2100 |
| AD-1071897.1 | AUCUGAAGUGUCUAAUGCAUA | 57 | 2172-2192 | UAUGCAUUAGACACUUCAGAUGU | 58 | 2170-2192 |
| AD-1071864.1 | ACAGACUUAGGAGUUUUGUUA | 59 | 2139-2159 | UAACAAAACUCCUAAGUCUGUCC | 60 | 2137-2159 |
| AD-1071927.1 | AAGGUACUGAAUACUUAAUAA | 61 | 2202-2222 | UUAUUAAGUAUUCAGUACCUUAC | 62 | 2200-2222 |
| AD-1070444.1 | AGGACCGUUACUAUCGUGAAA | 63 | 504-524 | UUUCACGAUAGUAACGGUCCUCA | 64 | 502-524 |
| AD-1071981.1 | CAAUGUGCACUGAAUCGUUUA | 65 | 2256-2276 | UAAACGAUUCAGUGCACAUUGUA | 66 | 2254-2276 |
| AD-1071509.1 | UCCUUUGUCCAUUUACCUGGA | 67 | 1694-1714 | UCCAGGUAAAUGGACAAAGGAGA | 68 | 1692-1714 |
| AD-1071902.1 | AAGUGUCUAAUGCAUUAACUA | 69 | 2177-2197 | UAGUUAAUGCAUUAGACACUUCA | 70 | 2175-2197 |
| AD-1071084.1 | AUCUUAGUAGAGAUUUCAUAA | 71 | 1222-1242 | UUAUGAAAUCUCUACUAAGAUAG | 72 | 1220-1242 |
| AD-1071948.1 | GUGGGAAACCCUUUUGCGUGA | 73 | 2223-2243 | UCACGCAAAAGGGUUUCCCACAU | 74 | 2221-2243 |
| AD-1071437.1 | GCAUUCCUUUCUUUAAACUAA | 75 | 1619-1639 | UUAGUUUAAAGAAAGGAAUGCCA | 76 | 1617-1639 |
| AD-1071508.1 | CUCCUUUGUCCAUUUACCUGA | 77 | 1693-1713 | UCAGGUAAAUGGACAAAGGAGAU | 78 | 1691-1713 |
| AD-1071265.1 | UUCAACAAGAGUAAAUAUUGA | 79 | 1447-1467 | UCAAUAUUUACUCUUGUUGAACA | 80 | 1445-1467 |
| AD-1070450.1 | GUUACUAUCGUGAAAACAUGA | 81 | 510-530 | UCAUGUUUUCACGAUAGUAACGG | 82 | 508-530 |
| AD-1070522.1 | UGCGUCAAUAUCACAAUCAAA | 83 | 602-622 | UUUGAUUGUGAUAUUGACGCAGU | 84 | 600-622 |
| AD-1071969.1 | UCCUUAGGCUUACAAUGUGCA | 85 | 2244-2264 | UGCACAUUGUAAGCCUAAGGACC | 86 | 2242-2264 |
| AD-1071352.1 | CUUCUGGGACUUGAAAUCAAA | 87 | 1534-1554 | UUUGAUUUCAAGUCCCAGAAGCC | 88 | 1532-1554 |
| AD-1071912.1 | UGCAUUAACUUUUGUAAGGUA | 89 | 2187-2207 | UACCUUACAAAAGUUAAUGCAUU | 90 | 2185-2207 |
| AD-1071885.1 | AGAGCAGUUAACAUCUGAAGA | 91 | 2160-2180 | UCUUCAGAUGUUAACUGCUCUAA | 92 | 2158-2180 |
| AD-1071949.1 | UGGGAAACCCUUUUGCGUGGA | 93 | 2224-2244 | UCCACGCAAAAGGGUUUCCCACA | 94 | 2222-2244 |
| AD-1071085.1 | UCUUAGUAGAGAUUUCAUAGA | 95 | 1223-1243 | UCUAUGAAAUCUCUACUAAGAUA | 96 | 1221-1243 |
| AD-1070516.1 | CACGACUGCGUCAAUAUCACA | 97 | 596-616 | UGUGAUAUUGACGCAGUCGUGCA | 98 | 594-616 |
| AD-1071895.1 | ACAUCUGAAGUGUCUAAUGCA | 99 | 2170-2190 | UGCAUUAGACACUUCAGAUGUUA | 100 | 2168-2190 |
| AD-1071430.1 | AUAUGUGGCAUUCCUUUCUUA | 101 | 1612-1632 | UAAGAAAGGAAUGCCACAUAUAG | 102 | 1610-1632 |
| AD-1070990.1 | UUGAGGCUAAAACAAAUCUCA | 103 | 1128-1148 | UGAGAUUUGUUUUAGCCUCAACC | 104 | 1126-1148 |
| AD-1071506.1 | AUCUCCUUUGUCCAUUUACCA | 105 | 1691-1711 | UGGUAAAUGGACAAAGGAGAUUU | 106 | 1689-1711 |
| AD-1071985.1 | GUGCACUGAAUCGUUUCAUGA | 107 | 2260-2280 | UCAUGAAACGAUUCAGUGCACAU | 108 | 2258-2280 |
| AD-1070511.1 | UUGUGCACGACUGCGUCAAUA | 109 | 591-611 | UAUUGACGCAGUCGUGCACAAAG | 110 | 589-611 |
| AD-1071301.1 | CUGGCUAGAGGACAUAUUCAA | 111 | 1483-1503 | UUGAAUAUGUCCUCUAGCCAGAG | 112 | 1481-1503 |
| AD-1071835.1 | UGCACUUUGUGAGUAUUCUAA | 113 | 2079-2099 | UUAGAAUACUCACAAAGUGCAAG | 114 | 2077-2099 |
| AD-1072054.1 | AUUUGUAACUUUGCAUGUUCA | 115 | 2344-2364 | UGAACAUGCAAAGUUACAAAUAU | 116 | 2342-2364 |
| AD-1070861.1 | CACUGGAAAACAUAGAGUAGA | 117 | 978-998 | UCUACUCUAUGUUUUCCAGUGCC | 118 | 976-998 |
| AD-1071230.1 | UUUUACUUUUCACAGUAUGGA | 119 | 1412-1432 | UCCAUACUGUGAAAAGUAAAACA | 120 | 1410-1432 |
| AD-1071435.1 | UGGCAUUCCUUUCUUUAAACA | 121 | 1617-1637 | UGUUUAAAGAAAGGAAUGCCACA | 122 | 1615-1637 |
| AD-1070553.1 | GGAGAACUUCACCGAGACCGA | 123 | 652-672 | UCGGUCUCGGUGAAGUUCUCCCC | 124 | 650-672 |
| AD-1071894.1 | AACAUCUGAAGUGUCUAAUGA | 125 | 2169-2189 | UCAUUAGACACUUCAGAUGUUAA | 126 | 2167-2189 |
| AD-1071652.1 | ACCAGAAUUAGGUCAAGUUCA | 127 | 1856-1876 | UGAACUUGACCUAAUUCUGGUUU | 128 | 1854-1876 |
| AD-1072050.1 | CUAUAUUUGUAACUUUGCAUA | 129 | 2340-2360 | UAUGCAAAGUUACAAAUAUAGAA | 130 | 2338-2360 |
| AD-1072052.1 | AUAUUUGUAACUUUGCAUGUA | 131 | 2342-2362 | UACAUGCAAAGUUACAAAUAUAG | 132 | 2340-2362 |
| AD-1071968.1 | GUCCUUAGGCUUACAAUGUGA | 133 | 2243-2263 | UCACAUUGUAAGCCUAAGGACCA | 134 | 2241-2263 |
| AD-1071441.1 | UCCUUUCUUUAAACUAUAGGA | 135 | 1623-1643 | UCCUAUAGUUUAAAGAAAGGAAU | 136 | 1621-1643 |
| AD-1071168.1 | AUCCUAGAGAUUCUUAGCUCA | 137 | 1330-1350 | UGAGCUAAGAAUCUCUAGGAUUU | 138 | 1328-1350 |
| AD-1070332.1 | GUGGAACAAGCCGAGUAAGCA | 139 | 361-381 | UGCUUACUCGGCUUGUUCCACUG | 140 | 359-381 |
| AD-1070964.1 | CUUAUUUUUGGACUUAGUGCA | 141 | 1102-1122 | UGCACUAAGUCCAAAAAUAAGUC | 142 | 1100-1122 |
| AD-1070974.1 | GACUUAGUGCAACAGGUUGAA | 143 | 1112-1132 | UUCAACCUGUUGCACUAAGUCCA | 144 | 1110-1132 |
| AD-1070935.1 | AACAGCAAAUAACCAUUGGUA | 145 | 1073-1093 | UACCAAUGGUUAUUUGCUGUUAU | 146 | 1071-1093 |
| AD-1071016.1 | GUCUGAAAUACCUUUGCCUGA | 147 | 1154-1174 | UCAGGCAAAGGUAUUUCAGACUG | 148 | 1152-1174 |
| AD-1071163.1 | GCCACAUGAUACUUAUUCAAA | 149 | 1306-1326 | UUUGAAUAAGUAUCAUGUGGCCU | 150 | 1304-1326 |
| AD-1071500.1 | AGGCAAAUCUCCUUUGUCCAA | 151 | 1685-1705 | UUGGACAAAGGAGAUUUGCCUUC | 152 | 1683-1705 |
| AD-1071664.1 | UCAAGUUCAUAGUUUCUGUAA | 153 | 1868-1888 | UUACAGAAACUAUGAACUUGACC | 154 | 1866-1888 |
| AD-1071983.1 | AUGUGCACUGAAUCGUUUCAA | 155 | 2258-2278 | UUGAAACGAUUCAGUGCACAUUG | 156 | 2256-2278 |
| AD-1072083.1 | AUCUGACUGAAAUUAAACGAA | 157 | 2400-2420 | UUCGUUUAAUUUCAGUCAGAUAU | 158 | 2398-2420 |
| AD-1071505.1 | AAUCUCCUUUGUCCAUUUACA | 159 | 1690-1710 | UGUAAAUGGACAAAGGAGAUUUG | 160 | 1688-1710 |
| AD-1071916.1 | UUAACUUUUGUAAGGUACUGA | 161 | 2191-2211 | UCAGUACCUUACAAAAGUUAAUG | 162 | 2189-2211 |
| AD-1071662.1 | GGUCAAGUUCAUAGUUUCUGA | 163 | 1866-1886 | UCAGAAACUAUGAACUUGACCUA | 164 | 1864-1886 |
| AD-1071074.1 | CUAAUGCCCUAUCUUAGUAGA | 165 | 1212-1232 | UCUACUAAGAUAGGGCAUUAGUA | 166 | 1210-1232 |
| AD-1070975.1 | ACUUAGUGCAACAGGUUGAGA | 167 | 1113-1133 | UCUCAACCUGUUGCACUAAGUCC | 168 | 1111-1133 |
| AD-1072048.1 | UUCUAUAUUUGUAACUUUGCA | 169 | 2338-2358 | UGCAAAGUUACAAAUAUAGAAAA | 170 | 2336-2358 |
| AD-1070752.1 | UAAUCUUUUUCCAGCUUGAGA | 171 | 859-879 | UCUCAAGCUGGAAAAAGAUUAGA | 172 | 857-879 |
| AD-1071491.1 | AGACACUGAAGGCAAAUCUCA | 173 | 1676-1696 | UGAGAUUUGCCUUCAGUGUCUAG | 174 | 1674-1696 |
| AD-1071965.1 | GUGGUCCUUAGGCUUACAAUA | 175 | 2240-2260 | UAUUGUAAGCCUAAGGACCACGC | 176 | 2238-2260 |
| AD-1070963.1 | ACUUAUUUUUGGACUUAGUGA | 177 | 1101-1121 | UCACUAAGUCCAAAAAUAAGUCC | 178 | 1099-1121 |
| AD-1070515.1 | GCACGACUGCGUCAAUAUCAA | 179 | 595-615 | UUGAUAUUGACGCAGUCGUGCAC | 180 | 593-615 |
| AD-1070488.1 | UGAGUACAGCAACCAGAACAA | 181 | 568-588 | UUGUUCUGGUUGCUGUACUCAUC | 182 | 566-588 |
| AD-1070462.1 | AACCAAGUGUACUACAGGCCA | 183 | 542-562 | UGGCCUGUAGUACACUUGGUUGG | 184 | 540-562 |
| AD-1072085.1 | CUGACUGAAAUUAAACGAGCA | 185 | 2402-2422 | UGCUCGUUUAAUUUCAGUCAGAU | 186 | 2400-2422 |
| AD-1071396.1 | GGCAACCUCCCAUUUUAGAUA | 187 | 1578-1598 | UAUCUAAAAUGGGAGGUUGCCUC | 188 | 1576-1598 |
| AD-1070491.1 | GUACAGCAACCAGAACAACUA | 189 | 571-591 | UAGUUGUUCUGGUUGCUGUACUC | 190 | 569-591 |
| AD-1072084.1 | UCUGACUGAAAUUAAACGAGA | 191 | 2401-2421 | UCUCGUUUAAUUUCAGUCAGAUA | 192 | 2399-2421 |
| AD-1071474.1 | AAAGUAAAUUGCCUUCUAGAA | 193 | 1659-1679 | UUCUAGAAGGCAAUUUACUUUUC | 194 | 1657-1679 |
| AD-1071093.1 | GAGAUUUCAUAGCUAUUUAGA | 195 | 1231-1251 | UCUAAAUAGCUAUGAAAUCUCUA | 196 | 1229-1251 |
| AD-1070498.1 | AACCAGAACAACUUUGUGCAA | 197 | 578-598 | UUGCACAAAGUUGUUCUGGUUGC | 198 | 576-598 |
| AD-1072086.1 | UGACUGAAAUUAAACGAGCGA | 199 | 2403-2423 | UCGCUCGUUUAAUUUCAGUCAGA | 200 | 2401-2423 |
| AD-1071213.1 | CAUGAGCUCUGUGUGUACCGA | 201 | 1377-1397 | UCGGUACACACAGAGCUCAUGCU | 202 | 1375-1397 |
| AD-1070492.1 | UACAGCAACCAGAACAACUUA | 203 | 572-592 | UAAGUUGUUCUGGUUGCUGUACU | 204 | 570-592 |
| AD-1070753.1 | AAUCUUUUUCCAGCUUGAGGA | 205 | 860-880 | UCCUCAAGCUGGAAAAAGAUUAG | 206 | 858-880 |
| AD-1071144.1 | CUGCCAGGUUUGUUAGGAGGA | 207 | 1287-1307 | UCCUCCUAACAAACCUGGCAGAA | 208 | 1285-1307 |
| AD-1072089.1 | CUGAAAUUAAACGAGCGAAGA | 209 | 2406-2426 | UCUUCGCUCGUUUAAUUUCAGUC | 210 | 2404-2426 |
| AD-1071950.1 | GGGAAACCCUUUUGCGUGGUA | 211 | 2225-2245 | UACCACGCAAAAGGGUUUCCCAC | 212 | 2223-2245 |
| AD-1072051.1 | UAUAUUUGUAACUUUGCAUGA | 213 | 2341-2361 | UCAUGCAAAGUUACAAAUAUAGA | 214 | 2339-2361 |
| AD-1070514.1 | UGCACGACUGCGUCAAUAUCA | 215 | 594-614 | UGAUAUUGACGCAGUCGUGCACA | 216 | 592-614 |
| AD-1070554.1 | GAGAACUUCACCGAGACCGAA | 217 | 653-673 | UUCGGUCUCGGUGAAGUUCUCCC | 218 | 651-673 |
| AD-1070340.1 | AGCCGAGUAAGCCAAAAACCA | 219 | 369-389 | UGGUUUUUGGCUUACUCGGCUUG | 220 | 367-389 |
| AD-1070539.1 | CAAGCAGCACACGGUCACCAA | 221 | 619-639 | UUGGUGACCGUGUGCUGCUUGAU | 222 | 617-639 |
| AD-1072049.1 | UCUAUAUUUGUAACUUUGCAA | 223 | 2339-2359 | UUGCAAAGUUACAAAUAUAGAAA | 224 | 2337-2359 |
| AD-1071507.1 | UCUCCUUUGUCCAUUUACCUA | 225 | 1692-1712 | UAGGUAAAUGGACAAAGGAGAUU | 226 | 1690-1712 |
| AD-1072047.1 | UUUCUAUAUUUGUAACUUUGA | 227 | 2337-2357 | UCAAAGUUACAAAUAUAGAAAAU | 228 | 2335-2357 |
| AD-1070497.1 | CAACCAGAACAACUUUGUGCA | 229 | 577-597 | UGCACAAAGUUGUUCUGGUUGCU | 230 | 575-597 |
| AD-1071669.1 | UUCAUAGUUUCUGUAAUUGGA | 231 | 1873-1893 | UCCAAUUACAGAAACUAUGAACU | 232 | 1871-1893 |
| AD-1070461.1 | CAACCAAGUGUACUACAGGCA | 233 | 541-561 | UGCCUGUAGUACACUUGGUUGGG | 234 | 539-561 |
| AD-1071499.1 | AAGGCAAAUCUCCUUUGUCCA | 235 | 1684-1704 | UGGACAAAGGAGAUUUGCCUUCA | 236 | 1682-1704 |
| AD-1070578.1 | AAGAUGAUGGAGCGCGUGGUA | 237 | 677-697 | UACCACGCGCUCCAUCAUCUUAA | 238 | 675-697 |
| AD-1070537.1 | AUCAAGCAGCACACGGUCACA | 239 | 617-637 | UGUGACCGUGUGCUGCUUGAUUG | 240 | 615-637 |
| AD-1070538.1 | UCAAGCAGCACACGGUCACCA | 241 | 618-638 | UGGUGACCGUGUGCUGCUUGAUU | 242 | 616-638 |
| AD-1070489.1 | GAGUACAGCAACCAGAACAAA | 243 | 569-589 | UUUGUUCUGGUUGCUGUACUCAU | 244 | 567-589 |
| AD-1070941.1 | AAAUAACCAUUGGUUAAUCUA | 245 | 1079-1099 | UAGAUUAACCAAUGGUUAUUUGC | 246 | 1077-1099 |
| AD-1070490.1 | AGUACAGCAACCAGAACAACA | 247 | 570-590 | UGUUGUUCUGGUUGCUGUACUCA | 248 | 568-590 |
| AD-1070552.1 | GGGAGAACUUCACCGAGACCA | 249 | 651-671 | UGGUCUCGGUGAAGUUCUCCCCC | 250 | 649-671 |
| AD-1071220.1 | UCUGUGUGUACCGAGAACUGA | 251 | 1384-1404 | UCAGUUCUCGGUACACACAGAGC | 252 | 1382-1404 |
| AD-1070577.1 | UAAGAUGAUGGAGCGCGUGGA | 253 | 676-696 | UCCACGCGCUCCAUCAUCUUAAC | 254 | 674-696 |
| AD-1070540.1 | AAGCAGCACACGGUCACCACA | 255 | 620-640 | UGUGGUGACCGUGUGCUGCUUGA | 256 | 618-640 |
| AD-1070331.1 | AGUGGAACAAGCCGAGUAAGA | 257 | 360-380 | UCUUACUCGGCUUGUUCCACUGA | 258 | 358-380 |
| AD-1072082.1 | UAUCUGACUGAAAUUAAACGA | 259 | 2399-2419 | UCGUUUAAUUUCAGUCAGAUAUU | 260 | 2397-2419 |
| AD-1070536.1 | AAUCAAGCAGCACACGGUCAA | 261 | 616-636 | UUGACCGUGUGCUGCUUGAUUGU | 262 | 614-636 |
| AD-1070512.1 | UGUGCACGACUGCGUCAAUAA | 263 | 592-612 | UUAUUGACGCAGUCGUGCACAAA | 264 | 590-612 |
| AD-1070535.1 | CAAUCAAGCAGCACACGGUCA | 265 | 615-635 | UGACCGUGUGCUGCUUGAUUGUG | 266 | 613-635 |
| AD-1070513.1 | GUGCACGACUGCGUCAAUAUA | 267 | 593-613 | UAUAUUGACGCAGUCGUGCACAA | 268 | 591-613 |
| AD-1070702.1 | CUCAUCUUCCUGAUAGUGGGA | 269 | 806-826 | UCCCACUAUCAGGAAGAUGAGGA | 270 | 804-826 |
| AD-1070576.1 | UUAAGAUGAUGGAGCGCGUGA | 271 | 675-695 | UCACGCGCUCCAUCAUCUUAACG | 272 | 673-695 |

TABLE 3
Modified Sense and Antisense Strand Sequences of PRNP dsRNA Agents

| | | SEQ | | SEQ | | SEQ |
|---|---|---|---|---|---|---|
| Duplex | Sense Sequence | ID | Antisense Sequence | ID | | ID |
| Name | 5′ to 3′ | NO: | 5′ to 3′ | NO: | mRNA target sequence | NO |
| AD- | cscsuag(Chd)AfgAf | 273 | VPusAfsguaAfuAfCfauauCfuGfcuagg | 274 | CACCUAGCAGAUAUGUAUUA | 275 |
| 1071792.1 | UfAfuguauuacsusa | | susg | | CUU | |
| AD- | cscscug(Ahd)AfuUf | 276 | VPusCfsaauAfuCfAfaacaAfuUfcaggg | 277 | UUCCCUGAAUUGUUUGAUAU | 278 |
| 1071769.1 | GfUfuugauauusgsa | | sasa | | UGU | |
| AD- | gsasauu(Ghd)UfuUf | 279 | VPusGfsugaCfaAfUfaucaAfaCfaauuc | 280 | CUGAAUUGUUUGAUAUUGUC | 281 |
| 1071773.1 | GfAfuauugucascsa | | sasg | | ACC | |
| AD- | gsgsaga(Uhd)GfaCf | 282 | VPusAfsucaUfaUfUfucugUfcAfucucc | 283 | UUGGAGAUGACAGAAAUAUG | 284 |
| 1071718.1 | AfGfaaauaugasusa | | sasa | | AUU | |
| AD- | ususagg(Ahd)GfuUf | 285 | VPusGfscucUfaAfAfcaaaAfcUfccua | 286 | ACUUAGGAGUUUUGUUUAGA | 287 |
| 1071870.1 | UfUfguuuagagscsa | | asgsu | | GCA | |
| AD- | gsusguc(Uhd)AfaUf | 288 | VPusAfsaagUfuAfAfugcaUfuAfgacac | 289 | AAGUGUCUAAUGCAUUAACU | 290 |
| 1071904.1 | GfCfauuaacuususa | | susu | | UUU | |
| AD- | uscsacc(Uhd)AfgCf | 291 | VPusAfsauaCfaUfAfucugCfuAfgguga | 292 | UGUCACCUAGCAGAUAUGUA | 293 |
| 1071789.1 | AfGfauauguaususa | | scsa | | UUA | |
| AD- | csasuag(Uhd)UfuCf | 294 | VPusAfsgccAfaUfUfacagAfaAfcuaug | 295 | UUCAUAGUUUCUGUAAUUGG | 296 |
| 1071671.1 | UfGfuaauuggcsusa | | sasa | | CUU | |
| AD- | asusuuc(Uhd)GfuCf | 297 | VPusGfsacaAfuUfAfugagAfcAfgaaau | 298 | UUAUUUCUGUCUCAUAAUUG | 299 |
| 1071628.1 | UfCfauaauuguscsa | | sasa | | UCA | |
| AD- | csasgac(Uhd)UfaGf | 300 | VPusAfsaacAfaAfAfcuccUfaAfgucug | 301 | GACAGACUUAGGAGUUUUGU | 302 |
| 1071865.1 | GfAfguuuuguususa | | susc | | UUA | |
| AD- | uscsaua(Ghd)UfuUf | 303 | VPusGfsccaAfuUfAfcagaAfaCfuauga | 304 | GUUCAUAGUUUCUGUAAUUG | 305 |
| 1071670.1 | CfUfguaauuggscsa | | sasc | | GCU | |
| AD- | gsasagu(Ghd)UfcUf | 306 | VPusGfsuuaAfuGfCfauuaGfaCfacuuc | 307 | CUGAAGUGUCUAAUGCAUUA | 308 |
| 1071901.1 | AfAfugcauuaascsa | | sasg | | ACU | |
| AD- | csascuu(Uhd)GfuGf | 309 | VPusCfsauaGfaAfUfacucAfcAfaagug | 310 | UGCACUUUGUGAGUAUUCUA | 311 |
| 1071837.1 | AfGfuauucuausgsa | | scsa | | UGU | |
| AD- | gsgsuac(Uhd)GfaAf | 312 | VPusCfsauaUfuAfAfguauUfcAfguacc | 313 | AAGGUACUGAAUACUUAAUA | 314 |
| 1071929.1 | UfAfcuuaauausgsa | | susu | | UGU | |
| AD- | usasuug(Ghd)CfuUf | 315 | VPusUfscacAfaAfGfugcaAfgCfcaaua | 316 | AUUAUUGGCUUGCACUUUGU | 317 |
| 1071827.1 | GfCfacuuugugsasa | | sasu | | GAG | |
| AD- | ususgua(Ahd)GfgUf | 318 | VPusAfsaguAfuUfCfaguaCfcUfuacaa | 319 | UUUUGUAAGGUACUGAAUAC | 320 |
| 1071923.1 | AfCfugaauacususa | | sasa | | UUA | |
| AD- | ususgca(Chd)UfuUf | 321 | VPusAfsgaaUfaCfUfcacaAfaGfugcaas | 322 | GCUUGCACUUUGUGAGUAUU | 323 |
| 1071834.1 | GfUfgaguauucsusa | | gsc | | CUA | |
| AD- | usgsugc(Ahd)CfuGf | 324 | VPusAfsugaAfaCfGfauucAfgUfgcaca | 325 | AAUGUGCACUGAAUCGUUUC | 326 |
| 1071984.1 | AfAfucguuucasusa | | susu | | AUG | |
| AD- | ususucu(Ghd)UfcUf | 327 | VPusUfsgacAfaUfUfaugaGfaCfagaaa | 328 | UAUUUCUGUCUCAUAAUUGU | 329 |
| 1071629.1 | CfAfuaauugucsasa | | susa | | CAA | |
| AD- | gsusuca(Uhd)AfgUf | 330 | VPusCfsaauUfaCfAfgaaaCfuAfugaacs | 331 | AAGUUCAUAGUUUCUGUAAU | 332 |
| 1071668.1 | UfUfcuguaauusgsa | | usu | | UGG | |
| AD- | csgsuua(Chd)UfaUf | 333 | VPusAfsuguUfuUfCfacgaUfaGfuaacg | 334 | ACCGUUACUAUCGUGAAAAC | 335 |
| 1070449.1 | CfGfugaaaacasusa | | sgsu | | AUG | |
| AD- | gscsacu(Uhd)UfgUf | 336 | VPusAfsuagAfaUfAfcucaCfaAfagugc | 337 | UUGCACUUUGUGAGUAUUCU | 338 |
| 1071836.1 | GfAfguauucuasusa | | sasa | | AUG | |
| AD- | asuscug(Ahd)AfgUf | 339 | VPusAfsugcAfuUfAfgacaCfuUfcagau | 340 | ACAUCUGAAGUGUCUAAUGC | 341 |
| 1071897.1 | GfUfcuaaugcasusa | | sgsu | | AUU | |
| AD- | ascsaga(Chd)UfuAf | 342 | VPusAfsacaAfaAfCfuccuAfaGfucugu | 343 | GGACAGACUUAGGAGUUUUG | 344 |
| 1071864.1 | GfGfaguuuugususa | | scSc | | UUU | |
| AD- | asasggu(Ahd)CfuGf | 345 | VPusUfsauuAfaGfUfauucAfgUfaccuu | 346 | GUAAGGUACUGAAUACUUAA | 347 |
| 1071927.1 | AfAfuacuuaausasa | | sasc | | UAU | |
| AD- | asgsgac(Chd)GfuUf | 348 | VPusUfsucaCfgAfUfaguaAfcGfguccu | 349 | UGAGGACCGUUACUAUCGUG | 350 |
| 1070444.1 | AfCfuaucgugasasa | | scsa | | AAA | |
| AD- | csasaug(Uhd)GfcAf | 351 | VPusAfsaacGfaUfUfcaguGfcAfcauug | 352 | UACAAUGUGCACUGAAUCGU | 353 |
| 1071981.1 | CfUfgaaucguususa | | susa | | UUC | |
| AD- | uscscuu(Uhd)GfuCf | 354 | VPusCfscagGfuAfAfauggAfcAfaagga | 355 | UCUCCUUUGUCCAUUUACCU | 356 |
| 1071509.1 | CfAfuuuaccugsgsa | | sgsa | | GGA | |
| AD- | asasgug(Uhd)CfuAf | 357 | VPusAfsguuAfaUfGfcauuAfgAfcacuu | 358 | UGAAGUGUCUAAUGCAUUAA | 359 |
| 1071902.1 | AfUfgcauuaacsusa | | scsa | | CUU | |
| AD- | asuscuu(Ahd)GfuAf | 360 | VPusUfsaugAfaAfUfcucuAfcUfaagau | 361 | CUAUCUUAGUAGAGAUUUCA | 362 |
| 1071084.1 | GfAfgauuucausasa | | sasg | | UAG | |
| AD- | gsusggg(Ahd)AfaCf | 363 | VPusCfsacgCfaAfAfagggUfuUfcccac | 364 | AUGUGGGAAACCCUUUUGCG | 365 |
| 1071948.1 | CfCfuuuugcgusgsa | | sasu | | UGG | |
| AD- | gscsauu(Chd)CfuUf | 366 | VPusUfsaguUfuAfAfagaaAfgGfaaugc | 367 | UGGCAUUCCUUUCUUUAAAC | 368 |
| 1071437.1 | UfCfuuuaaacusasa | | scsa | | UAU | |
| AD- | csusccu(Uhd)UfgUf | 369 | VPusCfsaggUfaAfAfuggaCfaAfaggag | 370 | AUCUCCUUUGUCCAUUUACC | 371 |
| 1071508.1 | CfCfauuuaccusgsa | | sasu | | UGG | |
| AD- | ususcaa(Chd)AfaGf | 372 | VPusCfsaauAfuUfUfacucUfuGfuugaa | 373 | UGUUCAACAAGAGUAAAUAU | 374 |
| 1071265.1 | AfGfuaaauauusgsa | | scsa | | UGU | |
| AD- | gsusuac(Uhd)AfuCf | 375 | VPusCfsaugUfuUfUfcacgAfuAfguaac | 376 | CCGUUACUAUCGUGAAAACA | 377 |
| 1070450.1 | GfUfgaaaacausgsa | | sgsg | | UGC | |
| AD- | usgscgu(Chd)AfaUf | 378 | VPusUfsugaUfuGfUfgauaUfuGfacgca | 379 | ACUGCGUCAAUAUCACAAUC | 380 |
| 1070522.1 | AfUfcacaaucasasa | | sgsu | | AAG | |
| AD- | uscscuu(Ahd)GfgCf | 381 | VPusGfscacAfuUfGfuaagCfcUfaagga | 382 | GGUCCUUAGGCUUACAAUGU | 383 |
| 1071969.1 | UfUfacaaugugscsa | | SCSC | | GCA | |
| AD- | csusucu(Ghd)GfgAf | 384 | VPusUfsugaUfuUfCfaaguCfcCfagaag | 385 | GGCUUCUGGGACUUGAAAUC | 386 |
| 1071352.1 | CfUfugaaaucasasa | | ScSC | | AAA | |
| AD- | usgscau(Uhd)AfaCf | 387 | VPusAfsccuUfaCfAfaaagUfuAfaugca | 388 | AAUGCAUUAACUUUUGUAAG | 389 |
| 1071912.1 | UfUfuuguaaggsusa | | susu | | GUA | |
| AD- | asgsagc(Ahd)GfuUf | 390 | VPusCfsuucAfgAfUfguuaAfcUfgcucu | 391 | UUAGAGCAGUUAACAUCUGA | 392 |
| 1071885.1 | AfAfcaucugaasgsa | | sasa | | AGU | |
| AD- | usgsgga(Ahd)AfcCf | 393 | VPusCfscacGfcAfAfaaggGfuUfuccca | 394 | UGUGGGAAACCCUUUUGCGU | 395 |
| 1071949.1 | CfUfuuugcgugsgsa | | scsa | | GGU | |
| AD- | uscsuua(Ghd)UfaG | 396 | VPusCfsuauGfaAfAfucucUfaCfuaaga | 397 | UAUCUUAGUAGAGAUUUCAU | 398 |
| 1071085.1 | fAfGfauuucauasgsa | | susa | | AGC | |
| AD | csascga(Chd)UfgCf | 399 | VPusGfsugaUfaUfUfgacgCfaGfucgug | 400 | UGCACGACUGCGUCAAUAUC | 401 |
| 1070516.1 | GfUfcaauaucascsa | | scsa | | ACA | |
| AD- | ascsauc(Uhd)GfaAf | 402 | VPusGfscauUfaGfAfcacuUfcAfgaugu | 403 | UAACAUCUGAAGUGUCUAAU | 404 |
| 1071895.1 | GfUfgucuaaugscsa | | susa | | GCA | |
| AD- | asusaug(Uhd)GfgCf | 405 | VPusAfsagaAfaGfGfaaugCfcAfcauau | 406 | CUAUAUGUGGCAUUCCUUUC | 407 |
| 1071430.1 | AfUfuccuuucususa | | sasg | | UUU | |
| AD- | ususgag(Ghd)CfuAf | 408 | VPusGfsagaUfuUfGfuuuuAfgCfcucaa | 409 | GGUUGAGGCUAAAACAAAUC | 410 |
| 1070990.1 | AfAfacaaaucuscsa | | scSC | | UCA | |
| AD- | asuscuc(Chd)UfuUf | 411 | VPusGfsguaAfaUfGfgacaAfaGfgagau | 412 | AAAUCUCCUUUGUCCAUUUA | 413 |
| 1071506.1 | GfUfccauuuacscsa | | susu | | CCU | |
| AD- | gsusgca(Chd)UfgAf | 414 | VPusCfsaugAfaAfCfgauuCfaGfugcac | 415 | AUGUGCACUGAAUCGUUUCA | 416 |
| 1071985.1 | AfUfcguuucausgsa | | sasu | | UGU | |
| AD- | ususgug(Chd)AfcGf | 417 | VPusAfsuugAfcGfCfagucGfuGfcacaa | 418 | CUUUGUGCACGACUGCGUCA | 419 |
| 1070511.1 | AfCfugcgucaasusa | | sasg | | AUA | |
| AD- | csusggc(Uhd)AfgAf | 420 | VPusUfsgaaUfaUfGfuccuCfuAfgccag | 421 | CUCUGGCUAGAGGACAUAUU | 422 |
| 1071301.1 | GfGfacauauucsasa | | sasg | | CAC | |
| AD- | usgscac(Uhd)UfuG | 423 | VPusUfsagaAfuAfCfucacAfaAfgugca | 424 | CUUGCACUUUGUGAGUAUUC | 425 |
| 1071835.1 | fUfGfaguauucusasa | | sasg | | UAU | |
| AD- | asusuug(Uhd)AfaCf | 426 | VPusGfsaacAfuGfCfaaagUfuAfcaaau | 427 | AUAUUUGUAACUUUGCAUGU | 428 |
| 1072054.1 | csaUfUfugcauguus | | sasu | | UCU | |
| AD- | csascug(Ghd)AfaAf | 429 | VPusCfsuacUfcUfAfuguuUfuCfcagug | 430 | GGCACUGGAAAACAUAGAGU | 431 |
| 1070861.1 | AfCfauagaguasgsa | | SCSC | | AGA | |
| AD- | ususuua(Chd)UfuUf | 432 | VPusCfscauAfcUfGfugaaAfaGfuaaaa | 433 | UGUUUUACUUUUCACAGUAU | 434 |
| 1071230.1 | UfCfacaguaugsgsa | | scsa | | GGG | |
| AD- | usgsgca(Uhd)UfcCf | 435 | VPusGfsuuuAfaAfGfaaagGfaAfugcca | 436 | UGUGGCAUUCCUUUCUUUAA | 437 |
| 1071435.1 | UfUfucuuuaaascsa | | scsa | | ACU | |
| AD- | gsgsaga(Ahd)CfuUf | 438 | VPusCfsgguCfuCfGfgugaAfgUfucucc | 439 | GGGGAGAACUUCACCGAGAC | 440 |
| 1070553.1 | CfAfccgagaccsgsa | | SCSC | | CGA | |
| AD- | asascau(Chd)UfgAf | 441 | VPusCfsauuAfgAfCfacuuCfaGfauguu | 442 | UUAACAUCUGAAGUGUCUAA | 443 |
| 1071894.1 | AfGfugucuaausgsa | | sasa | | UGC | |
| AD- | ascscag(Ahd)AfuUf | 444 | VPusGfsaacUfuGfAfccuaAfuUfcuggu | 445 | AAACCAGAAUUAGGUCAAGU | 446 |
| 1071652.1 | AfGfgucaaguuscsa | | susu | | UCA | |
| AD- | csusaua(Uhd)UfuGf | 447 | VPusAfsugcAfaAfGfuuacAfaAfuauag | 448 | UUCUAUAUUUGUAACUUUGC | 449 |
| 1072050.1 | UfAfacuuugcasusa | | sasa | | AUG | |
| AD- | asusauu(Uhd)GfuAf | 450 | VPusAfscauGfcAfAfaguuAfcAfaauau | 451 | CUAUAUUUGUAACUUUGCAU | 452 |
| 1072052.1 | AfCfuuugcaugsusa | | sasg | | GUU | |
| AD- | gsusccu(Uhd)AfgGf | 453 | VPusCfsacaUfuGfUfaagcCfuAfaggac | 454 | UGGUCCUUAGGCUUACAAUG | 455 |
| 1071968.1 | CfUfuacaaugusgsa | | scsa | | UGC | |
| AD- | uscscuu(Uhd)CfuUf | 456 | VPusCfscuaUfaGfUfuuaaAfgAfaagga | 457 | AUUCCUUUCUUUAAACUAUA | 458 |
| 1071441.1 | UfAfaacuauagsgsa | | sasu | | GGU | |
| AD- | asusccu(Ahd)GfaGf | 459 | VPusGfsagcUfaAfGfaaucUfcUfaggau | 460 | AAAUCCUAGAGAUUCUUAGC | 461 |
| 1071168.1 | AfUfucuuagcuscsa | | susu | | UCU | |
| AD- | gsusgga(Ahd)CfaAf | 462 | VPusGfscuuAfcUfCfggcuUfgUfuccac | 463 | CAGUGGAACAAGCCGAGUAA | 464 |
| 1070332.1 | GfCfcgaguaagscsa | | susg | | GCC | |
| AD- | csusuau(Uhd)UfuU | 465 | VPusGfscacUfaAfGfuccaAfaAfauaag | 466 | GACUUAUUUUUGGACUUAGU | 467 |
| 1070964.1 | fGfGfacuuagugscsa | | susc | | GCA | |
| AD- | gsascuu(Ahd)GfuGf | 468 | VPusUfscaaCfcUfGfuugcAfcUfaaguc | 469 | UGGACUUAGUGCAACAGGUU | 470 |
| 1070974.1 | CfAfacagguugsasa | | scsa | | GAG | |
| AD- | asascag(Chd)AfaAf | 471 | VPusAfsccaAfuGfGfuuauUfuGfcuguu | 472 | AUAACAGCAAAUAACCAUUG | 473 |
| 1070935.1 | UfAfaccauuggsusa | | sasu | | GUU | |
| AD- | gsuscug(Ahd)AfaUf | 474 | VPusCfsaggCfaAfAfgguaUfuUfcagac | 475 | CAGUCUGAAAUACCUUUGCC | 476 |
| 1071016.1 | AfCfcuuugccusgsa | | susg | | UGG | |
| AD- | gscscac(Ahd)UfgAf | 477 | VPusUfsugaAfuAfAfguauCfaUfguggc | 478 | AGGCCACAUGAUACUUAUUC | 479 |
| 1071163.1 | UfAfcuuauucasasa | | scsu | | AAA | |
| AD- | asgsgca(Ahd)AfuCf | 480 | VPusUfsggaCfaAfAfggagAfuUfugccu | 481 | GAAGGCAAAUCUCCUUUGUC | 482 |
| 1071500.1 | UfCfcuuuguccsasa | | susc | | CAU | |
| AD- | uscsaag(Uhd)UfcAf | 483 | VPusUfsacaGfaAfAfcuauGfaAfcuuga | 484 | GGUCAAGUUCAUAGUUUCUG | 485 |
| 1071664.1 | UfAfguuucugusasa | | ScSC | | UAA | |
| AD- | asusgug(Chd)AfcUf | 486 | VPusUfsgaaAfcGfAfuucaGfuGfcacau | 487 | CAAUGUGCACUGAAUCGUUU | 488 |
| 1071983.1 | GfAfaucguuucsasa | | susg | | CAU | |
| AD- | asuscug(Ahd)CfuGf | 489 | VPusUfscguUfuAfAfuuucAfgUfcagau | 490 | AUAUCUGACUGAAAUUAAAC | 491 |
| 1072083.1 | AfAfauuaaacgsasa | | sasu | | GAG | |
| AD- | asasucu(Chd)CfuUf | 492 | VPusGfsuaaAfuGfGfacaaAfgGfagauu | 493 | CAAAUCUCCUUUGUCCAUUU | 494 |
| 1071505.1 | UfGfuccauuuascsa | | susg | | ACC | |
| AD- | ususaac(Uhd)UfuUf | 495 | VPusCfsaguAfcCfUfuacaAfaAfguuaa | 496 | CAUUAACUUUUGUAAGGUAC | 497 |
| 1071916.1 | GfUfaagguacusgsa | | susg | | UGA | |
| AD- | gsgsuca(Ahd)GfuUf | 498 | VPusCfsagaAfaCfUfaugaAfcUfugacc | 499 | UAGGUCAAGUUCAUAGUUUC | 500 |
| 1071662.1 | CfAfuaguuucusgsa | | susa | | UGU | |
| AD- | csusaau(Ghd)CfcCf | 501 | VPusCfsuacUfaAfGfauagGfgCfauuag | 502 | UACUAAUGCCCUAUCUUAGU | 503 |
| 1071074.1 | UfAfucuuaguasgsa | | susa | | AGA | |
| AD- | ascsuua(Ghd)UfgCf | 504 | VPusCfsucaAfcCfUfguugCfaCfuaagu | 505 | GGACUUAGUGCAACAGGUUG | 506 |
| 1070975.1 | AfAfcagguugasgsa | | ScSC | | AGG | |
| AD- | ususcua(Uhd)AfuUf | 507 | VPusGfscaaAfgUfUfacaaAfuAfuagaa | 508 | UUUUCUAUAUUUGUAACUUU | 509 |
| 1072048.1 | UfGfuaacuuugscsa | | sasa | | GCA | |
| AD- | usasauc(Uhd)UfuUf | 510 | VPusCfsucaAfgCfUfggaaAfaAfgauua | 511 | UCUAAUCUUUUUCCAGCUUG | 512 |
| 1070752.1 | UfCfcagcuugasgsa | | sgsa | | AGG | |
| AD- | asgsaca(Chd)UfgAf | 513 | VPusGfsagaUfuUfGfccuuCfaGfugucu | 514 | CUAGACACUGAAGGCAAAUC | 515 |
| 1071491.1 | AfGfgcaaaucuscsa | | sasg | | UCC | |
| AD- | gsusggu(Chd)CfuUf | 516 | VPusAfsuugUfaAfGfccuaAfgGfaccac | 517 | GCGUGGUCCUUAGGCUUACA | 518 |
| 1071965.1 | AfGfgcuuacaasusa | | sgsc | | AUG | |
| AD- | ascsuua(Uhd)UfuUf | 519 | VPusCfsacuAfaGfUfccaaAfaAfuaagu | 520 | GGACUUAUUUUUGGACUUAG | 521 |
| 1070963.1 | UfGfgacuuagusgsa | | SCSC | | UGC | |
| AD- | gscsacg(Ahd)CfuGf | 522 | VPusUfsgauAfuUfGfacgcAfgUfcgugc | 523 | GUGCACGACUGCGUCAAUAU | 524 |
| 1070515.1 | CfGfucaauaucsasa | | sasc | | CAC | |
| AD- | usgsagu(Ahd)CfaGf | 525 | VPusUfsguuCfuGfGfuugcUfgUfacuca | 526 | GAUGAGUACAGCAACCAGAA | 527 |
| 1070488.1 | CfAfaccagaacsasa | | susc | | CAA | |
| AD- | asascca(Ahd)GfuGf | 528 | VPusGfsgccUfgUfAfguacAfcUfugguu | 529 | CCAACCAAGUGUACUACAGG | 530 |
| 1070462.1 | UfAfcuacaggcscsa | | sgsg | | CCC | |
| AD- | csusgac(Uhd)GfaAf | 531 | VPusGfscucGfuUfUfaauuUfcAfgucag | 532 | AUCUGACUGAAAUUAAACGA | 533 |
| 1072085.1 | AfUfuaaacgagscsa | | sasu | | GCG | |
| AD- | gsgscaa(Chd)CfuCf | 534 | VPusAfsucuAfaAfAfugggAfgGfuugc | 535 | GAGGCAACCUCCCAUUUUAG | 536 |
| 1071396.1 | CfCfauuuuagasusa | | csusc | | AUG | |
| AD- | gsusaca(Ghd)CfaAf | 537 | VPusAfsguuGfuUfCfugguUfgCfugua | 538 | GAGUACAGCAACCAGAACAA | 539 |
| 1070491.1 | CfCfagaacaacsusa | | csusc | | CUU | |
| AD- | uscsuga(Chd)UfgAf | 540 | VPusCfsucgUfuUfAfauuuCfaGfucaga | 541 | UAUCUGACUGAAAUUAAACG | 542 |
| 1072084.1 | AfAfuuaaacgasgsa | | susa | | AGC | |
| AD- | asasagu(Ahd)AfaUf | 543 | VPusUfscuaGfaAfGfgcaaUfuUfacuuu | 544 | GAAAAGUAAAUUGCCUUCUA | 545 |
| 1071474.1 | UfGfccuucuagsasa | | susc | | GAC | |
| AD- | gsasgau(Uhd)UfcAf | 546 | VPusCfsuaaAfuAfGfcuauGfaAfaucuc | 547 | UAGAGAUUUCAUAGCUAUUU | 548 |
| 1071093.1 | UfAfgcuauuuasgsa | | susa | | AGA | |
| AD- | asascca(Ghd)AfaCf | 549 | VPusUfsgcaCfaAfAfguugUfuCfugguu | 550 | GCAACCAGAACAACUUUGUG | 551 |
| 1070498.1 | AfAfcuuugugcsasa | | sgsc | | CAC | |
| AD- | usgsacu(Ghd)AfaAf | 552 | VPusCfsgcuCfgUfUfuaauUfuCfaguca | 553 | UCUGACUGAAAUUAAACGAG | 554 |
| 1072086.1 | gUfUfaaacgagcssa | | sgsa | | CGA | |
| AD- | csasuga(Ghd)CfuCf | 555 | VPusCfsgguAfcAfCfacagAfgCfucaug | 556 | AGCAUGAGCUCUGUGUGUAC | 557 |
| 1071213.1 | UfGfuguguaccsgsa | | scsu | | CGA | |
| AD- | usascag(Chd)AfaCf | 558 | VPusAfsaguUfgUfUfcuggUfuGfcugu | 559 | AGUACAGCAACCAGAACAAC | 560 |
| 1070492.1 | CfAfgaacaacususa | | ascsu | | UUU | |
| AD- | asasucu(Uhd)UfuUf | 561 | VPusCfscucAfaGfCfuggaAfaAfagauu | 562 | CUAAUCUUUUUCCAGCUUGA | 563 |
| 1070753.1 | CfCfagcuugagsgsa | | sasg | | GGG | |
| AD- | csusgcc(Ahd)GfgUf | 564 | VPusCfscucCfuAfAfcaaaCfcUfggcags | 565 | UUCUGCCAGGUUUGUUAGGA | 566 |
| 1071144.1 | UfUfguuaggagsgsa | | asa | | GGC | |
| AD- | csusgaa(Ahd)UfuAf | 567 | VPusCfsuucGfcUfCfguuuAfaUfuucag | 568 | GACUGAAAUUAAACGAGCGA | 569 |
| 1072089.1 | AfAfcgagcgaasgsa | | susc | | AGA | |
| AD- | gsgsgaa(Ahd)CfcCf | 570 | VPusAfsccaCfgCfAfaaagGfgUfuuccc | 571 | GUGGGAAACCCUUUUGCGUG | 572 |
| 1071950.1 | UfUfuugcguggsusa | | sasc | | GUC | |
| AD- | usasuau(Uhd)UfgUf | 573 | VPusCfsaugCfaAfAfguuaCfaAfauaua | 574 | UCUAUAUUUGUAACUUUGCA | 575 |
| 1072051.1 | AfAfcuuugcausgsa | | sgsa | | UGU | |
| AD- | usgscac(Ghd)AfcUf | 576 | VPusGfsauaUfuGfAfcgcaGfuCfgugca | 577 | UGUGCACGACUGCGUCAAUA | 578 |
| 1070514.1 | GfCfgucaauauscsa | | scsa | | UCA | |
| AD- | gsasgaa(Chd)UfuCf | 579 | VPusUfscggUfcUfCfggugAfaGfuucuc | 580 | GGGAGAACUUCACCGAGACC | 581 |
| 1070554.1 | AfCfcgagaccgsasa | | SCSC | | GAC | |
| AD- | asgsccg(Ahd)GfuAf | 582 | VPusGfsguuUfuUfGfgcuuAfcUfcggc | 583 | CAAGCCGAGUAAGCCAAAAA | 584 |
| 1070340.1 | AfGfccaaaaacscsa | | ususg | | CCA | |
| AD- | csasagc(Ahd)GfcAf | 585 | VPusUfsgguGfaCfCfguguGfcUfgcuug | 586 | AUCAAGCAGCACACGGUCACC | 587 |
| 1070539.1 | CfAfcggucaccsasa | | sasu | | AC | |
| AD- | uscsuau(Ahd)UfuUf | 588 | VPusUfsgcaAfaGfUfuacaAfaUfauaga | 589 | UUUCUAUAUUUGUAACUUUG | 590 |
| 1072049.1 | GfUfaacuuugcsasa | | sasa | | CAU | |
| AD- | uscsucc(Uhd)UfuGf | 591 | VPusAfsgguAfaAfUfggacAfaAfggaga | 592 | AAUCUCCUUUGUCCAUUUAC | 593 |
| 1071507.1 | UfCfcauuuaccsusa | | susu | | CUG | |
| AD- | ususucu(Ahd)UfaUf | 594 | VPusCfsaaaGfuUfAfcaaaUfaUfagaaas | 595 | AUUUUCUAUAUUUGUAACUU | 596 |
| 1072047.1 | UfUfguaacuuusgsa | | asu | | UGC | |
| AD- | csasacc(Ahd)GfaAf | 597 | VPusGfscacAfaAfGfuuguUfcUfgguug | 598 | AGCAACCAGAACAACUUUGU | 599 |
| 1070497.1 | CfAfacuuugugscsa | | scsu | | GCA | |
| AD- | ususcau(Ahd)GfuUf | 600 | VPusCfscaaUfuAfCfagaaAfcUfaugaas | 601 | AGUUCAUAGUUUCUGUAAUU | 602 |
| 1071669.1 | UfCfuguaauugsgsa | | csu | | GGC | |
| AD- | csasacc(Ahd)AfgUf | 603 | VPusGfsccuGfuAfGfuacaCfuUfgguug | 604 | CCCAACCAAGUGUACUACAG | 605 |
| 1070461.1 | GfUfacuacaggscsa | | sgsg | | GCC | |
| AD- | asasggc(Ahd)AfaUf | 606 | VPusGfsgacAfaAfGfgagaUfuUfgccuu | 607 | UGAAGGCAAAUCUCCUUUGU | 608 |
| 1071499.1 | CfUfccuuugucscsa | | scsa | | CCA | |
| AD- | asasgau(Ghd)AfuGf | 609 | VPusAfsccaCfgCfGfcuccAfuCfaucuu | 610 | UUAAGAUGAUGGAGCGCGUG | 611 |
| 1070578.1 | GfAfgcgcguggsusa | | sasa | | GUU | |
| AD- | asuscaa(Ghd)CfaGf | 612 | VPusGfsugaCfcGfUfgugcUfgCfuugau | 613 | CAAUCAAGCAGCACACGGUC | 614 |
| 1070537.1 | CfAfcacggucascsa | | susg | | ACC | |
| AD- | uscsaag(Chd)AfgCf | 615 | VPusGfsgugAfcCfGfugugCfuGfcuuga | 616 | AAUCAAGCAGCACACGGUCA | 617 |
| 1070538.1 | AfCfacggucacscsa | | susu | | CCA | |
| AD- | gsasgua(Chd)AfgCf | 618 | VPusUfsuguUfcUfGfguugCfuGfuacuc | 619 | AUGAGUACAGCAACCAGAAC | 620 |
| 1070489.1 | AfAfccagaacasasa | | sasu | | AAC | |
| AD- | asasaua(Ahd)CfcAf | 621 | VPusAfsgauUfaAfCfcaauGfgUfuauuu | 622 | GCAAAUAACCAUUGGUUAAU | 623 |
| 1070941.1 | UfUfgguuaaucsusa | | sgsc | | CUG | |
| AD- | asgsuac(Ahd)GfcAf | 624 | VPusGfsuugUfuCfUfgguuGfcUfguac | 625 | UGAGUACAGCAACCAGAACA | 626 |
| 1070490.1 | AfCfcagaacaascsa | | uscsa | | ACU | |
| AD- | gsgsgag(Ahd)AfcUf | 627 | VPusGfsgucUfcGfGfugaaGfuUfcuccc | 628 | GGGGGAGAACUUCACCGAGA | 629 |
| 1070552.1 | UfCfaccgagacscsa | | SCSC | | CCG | |
| AD- | uscsugu(Ghd)UfgUf | 630 | VPusCfsaguUfcUfCfgguaCfaCfacagas | 631 | GCUCUGUGUGUACCGAGAAC | 632 |
| 1071220.1 | AfCfcgagaacusgsa | | gsc | | UGG | |
| AD- | usasaga(Uhd)GfaUf | 633 | VPusCfscacGfcGfCfuccaUfcAfucuuas | 634 | GUUAAGAUGAUGGAGCGCGU | 635 |
| 1070577.1 | GfGfagcgcgugsgsa | | asc | | GGU | |
| AD- | asasgca(Ghd)CfaCf | 636 | VPusGfsuggUfgAfCfcgugUfgCfugcu | 637 | UCAAGCAGCACACGGUCACCA | 638 |
| 1070540.1 | AfCfggucaccascsa | | usgsa | | CA | |
| AD- | asgsugg(Ahd)AfcAf | 639 | VPusCfsuuaCfuCfGfgcuuGfuUfccacu | 640 | UCAGUGGAACAAGCCGAGUA | 641 |
| 1070331.1 | AfGfccgaguaasgsa | | sgsa | | AGC | |
| AD- | usasucu(Ghd)AfcU | 642 | VPusCfsguuUfaAfUfuucaGfuCfagaua | 643 | AAUAUCUGACUGAAAUUAAA | 644 |
| 1072082.1 | fGfAfaauuaaacsgsa | | susu | | CGA | |
| AD- | asasuca(Ahd)GfcAf | 645 | VPusUfsgacCfgUfGfugcuGfcUfugauu | 646 | ACAAUCAAGCAGCACACGGU | 647 |
| 1070536.1 | GfCfacacggucsasa | | sgsu | | CAC | |
| AD- | usgsugc(Ahd)CfgAf | 648 | VPusUfsauuGfaCfGfcaguCfgUfgcaca | 649 | UUUGUGCACGACUGCGUCAA | 650 |
| 1070512.1 | CfUfgcgucaausasa | | sasa | | UAU | |
| AD- | csasauc(Ahd)AfgCf | 651 | VPusGfsaccGfuGfUfgcugCfuUfgauug | 652 | CACAAUCAAGCAGCACACGG | 653 |
| 1070535.1 | AfGfcacacgguscsa | | susg | | UCA | |
| AD- | gsusgca(Chd)GfaCf | 654 | VPusAfsuauUfgAfCfgcagUfcGfugcac | 655 | UUGUGCACGACUGCGUCAAU | 656 |
| 1070513.1 | UfGfcgucaauasusa | | sasa | | AUC | |
| AD- | csuscau(Chd)UfuCf | 657 | VPusCfsccaCfuAfUfcaggAfaGfaugag | 658 | UCCUCAUCUUCCUGAUAGUG | 659 |
| 1070702.1 | CfUfgauaguggsgsa | | sgsa | | GGA | |
| AD- | ususaag(Ahd)UfgAf | 660 | VPusCfsacgCfgCfUfccauCfaUfcuuaas | 661 | CGUUAAGAUGAUGGAGCGCG | 662 |
| 1070576.1 | UfGfgagcgcgusgsa | | csg | | UGG | |

TABLE 4
In Vitro Screen in BE2C Cells

| | 50 nM | | 10 nM | | 1 nM | | 0.1 nM | |
|---|---|---|---|---|---|---|---|---|
| | % | | % | | % | | % | |
| Duplex | Message | | Message | | Message | | Message | |
| Name | Remaining | SD | Remaining | SD | Remaining | SD | Remaining | SD |
| AD-1071792.1 | 17.47 | 8.28 | 16.15 | 10.06 | 10.06 | 3.24 | 37.48 | 19.74 |
| AD-1071769.1 | 11.27 | 2.39 | 11.93 | 2.20 | 11.22 | 4.10 | 21.08 | 3.34 |
| AD-1071773.1 | 22.46 | 15.85 | 10.22 | 2.73 | 12.20 | 4.36 | 21.58 | 5.45 |
| AD-1071718.1 | 15.03 | 9.00 | 17.61 | 12.55 | 12.47 | 4.35 | 33.70 | 3.59 |
| AD-1071870.1 | 11.69 | 5.41 | 16.47 | 2.36 | 13.28 | 2.33 | 40.70 | 6.94 |
| AD-1071904.1 | 9.51 | 3.39 | 14.86 | 3.76 | 13.71 | 1.39 | 34.61 | 15.59 |
| AD-1071789.1 | 17.18 | 8.61 | 14.47 | 4.92 | 13.82 | 1.75 | 30.99 | 20.42 |
| AD-1071671.1 | 14.05 | 3.51 | 16.77 | 4.90 | 14.80 | 2.99 | 41.95 | 5.57 |
| AD-1071628.1 | 16.00 | 3.78 | 17.77 | 7.31 | 15.97 | 5.42 | 43.15 | 13.81 |
| AD-1071865.1 | 10.00 | 2.37 | 21.96 | 10.32 | 16.27 | 2.91 | 40.54 | 7.10 |
| AD-1071670.1 | 9.11 | 0.89 | 11.69 | 1.14 | 16.77 | 5.40 | 34.60 | 1.81 |
| AD-1071901.1 | 12.51 | 3.05 | 14.84 | 2.61 | 16.78 | 1.94 | 37.54 | 2.01 |
| AD-1071837.1 | 9.12 | 1.88 | 16.85 | 2.48 | 16.94 | 4.38 | 44.41 | 6.44 |
| AD-1071929.1 | 9.32 | 2.11 | 17.08 | 4.51 | 17.05 | 1.29 | 34.83 | 7.02 |
| AD-1071827.1 | 11.05 | 6.16 | 17.80 | 10.37 | 17.23 | 0.49 | 37.22 | 11.67 |
| AD-1071923.1 | 17.18 | 6.06 | 15.54 | 1.53 | 18.49 | 5.79 | 32.98 | 4.96 |
| AD-1071834.1 | 12.28 | 5.19 | 18.10 | 1.38 | 18.51 | 3.90 | 38.85 | 5.39 |
| AD-1071984.1 | 9.00 | 3.95 | 12.34 | 1.56 | 18.82 | 6.52 | 49.61 | 33.26 |
| AD-1071629.1 | 18.88 | 8.46 | 18.61 | 13.02 | 18.85 | 5.56 | 31.10 | 2.15 |
| AD-1071668.1 | 43.39 | 24.72 | 25.49 | 17.25 | 19.25 | 9.19 | 132.66 | 48.78 |
| AD-1070449.1 | 8.63 | 1.56 | 12.57 | 2.05 | 19.29 | 2.33 | 36.71 | 16.16 |
| AD-1071836.1 | 10.40 | 4.50 | 15.13 | 2.16 | 19.65 | 3.55 | 56.15 | 8.86 |
| AD-1071897.1 | 19.77 | 12.34 | 16.13 | 0.93 | 20.08 | 3.99 | 43.47 | 1.36 |
| AD-1071864.1 | 13.56 | 4.01 | 30.25 | 10.94 | 20.31 | 4.09 | 60.81 | 10.43 |
| AD-1071927.1 | 14.34 | 6.84 | 14.95 | 2.74 | 20.46 | 3.96 | 36.32 | 6.99 |
| AD-1070444.1 | 11.11 | 3.88 | 11.80 | 1.80 | 20.51 | 4.24 | 36.92 | 5.85 |
| AD-1071981.1 | 17.27 | 9.46 | 19.34 | 8.52 | 20.51 | 4.88 | 104.28 | 14.93 |
| AD-1071509.1 | 9.48 | 1.67 | 15.96 | 7.29 | 20.52 | 3.78 | 24.08 | 7.09 |
| AD-1071902.1 | 10.79 | 2.51 | 17.11 | 2.36 | 20.56 | 1.95 | 41.58 | 5.37 |
| AD-1071084.1 | 17.34 | 1.45 | 15.60 | 1.22 | 20.70 | 4.43 | 36.63 | 1.77 |
| AD-1071948.1 | 11.47 | 5.92 | 17.10 | 4.37 | 21.47 | 4.72 | 46.75 | 13.97 |
| AD-1071437.1 | 16.29 | 5.45 | 14.94 | 1.13 | 21.62 | 1.35 | 29.34 | 1.20 |
| AD-1071508.1 | 21.65 | 14.42 | 19.80 | 7.17 | 22.14 | 4.13 | 66.88 | 38.71 |
| AD-1071265.1 | 15.44 | 2.13 | 15.53 | 1.45 | 22.15 | 1.41 | 35.37 | 3.69 |
| AD-1070450.1 | 12.22 | 4.33 | 12.87 | 1.53 | 22.52 | 4.85 | 57.46 | 34.12 |
| AD-1070522.1 | 30.78 | 25.39 | 20.05 | 11.00 | 23.00 | 4.53 | 43.74 | 22.48 |
| AD-1071969.1 | 22.44 | 10.98 | 13.73 | 2.03 | 23.45 | 3.44 | 40.87 | 4.51 |
| AD-1071352.1 | 16.53 | 1.53 | 20.86 | 11.93 | 23.57 | 2.72 | 43.35 | 23.87 |
| AD-1071912.1 | 16.84 | 6.88 | 14.11 | 5.90 | 23.63 | 3.42 | 29.95 | 19.98 |
| AD-1071885.1 | 14.16 | 1.81 | 17.43 | 7.96 | 24.11 | 4.52 | 40.04 | 11.20 |
| AD-1071949.1 | 14.12 | 11.28 | 15.16 | 2.90 | 24.38 | 10.38 | 41.91 | 17.02 |
| AD-1071085.1 | 17.83 | 1.85 | 16.38 | 2.14 | 24.69 | 1.12 | 35.46 | 3.03 |
| AD-1070516.1 | 16.80 | 5.0 | 14.12 | 2.37 | 24.69 | 2.63 | 37.01 | 4.77 |
| AD-1071895.1 | 16.62 | 6.56 | 17.65 | 3.00 | 25.00 | 2.95 | 46.41 | 7.80 |
| AD-1071430.1 | 14.71 | 8.00 | 15.75 | 11.23 | 25.25 | 9.56 | 34.47 | 12.14 |
| AD-1070990.1 | 20.86 | 2.43 | 22.25 | 12.33 | 25.25 | 2.78 | 38.04 | 6.47 |
| AD-1071506.1 | 22.00 | 8.69 | 18.76 | 6.18 | 25.37 | 5.22 | 62.07 | 21.73 |
| AD-1071985.1 | 15.99 | 7.42 | 13.43 | 9.06 | 25.49 | 7.38 | 20.34 | 2.40 |
| AD-1070511.1 | 17.85 | 4.67 | 16.92 | 3.17 | 26.08 | 5.59 | 46.62 | 17.19 |
| AD-1071301.1 | 21.07 | 2.50 | 17.79 | 0.54 | 26.11 | 2.97 | 37.92 | 5.47 |
| AD-1071835.1 | 16.79 | 5.65 | 16.93 | 1.83 | 26.14 | 6.68 | 46.38 | 5.31 |
| AD-1072054.1 | 17.36 | 6.48 | 9.72 | 2.10 | 26.28 | 8.39 | 14.55 | 2.08 |
| AD-1070861.1 | 18.15 | 6.69 | 25.62 | 10.65 | 26.68 | 6.60 | 37.64 | 4.79 |
| AD-1071230.1 | 17.46 | 1.82 | 18.05 | 0.85 | 26.70 | 2.83 | 45.85 | 3.14 |
| AD-1071435.1 | 20.04 | 8.16 | 21.28 | 9.02 | 27.04 | 11.48 | 45.74 | 15.23 |
| AD-1070553.1 | 34.84 | 26.85 | 26.45 | 15.99 | 27.09 | 5.03 | 43.38 | 6.85 |
| AD-1071894.1 | 15.96 | 3.91 | 23.71 | 8.49 | 27.17 | 2.63 | 41.76 | 0.99 |
| AD-1071652.1 | 36.23 | 17.71 | 25.61 | 16.27 | 27.53 | 10.93 | 49.67 | 4.80 |
| AD-1072050.1 | 19.12 | 6.28 | 21.30 | 10.37 | 28.19 | 6.62 | 137.16 | 77.57 |
| AD-1072052.1 | 14.58 | 0.52 | 15.80 | 1.98 | 28.97 | 7.89 | 73.13 | 41.68 |
| AD-1071968.1 | 15.41 | 2.70 | 16.54 | 3.35 | 29.13 | 0.87 | 48.53 | 17.78 |
| AD-1071441.1 | 16.47 | 2.01 | 16.45 | 1.96 | 29.53 | 4.89 | 45.17 | 7.41 |
| AD-1071168.1 | 18.27 | 9.81 | 23.36 | 13.98 | 29.63 | 6.27 | 46.19 | 7.80 |
| AD-1070332.1 | 14.29 | 4.28 | 17.99 | 2.02 | 30.06 | 8.58 | 50.79 | 9.18 |
| AD-1070964.1 | 20.85 | 2.82 | 19.99 | 2.13 | 30.50 | 2.58 | 40.97 | 0.46 |
| AD-1070974.1 | 22.87 | 4.98 | 15.73 | 1.56 | 30.65 | 2.38 | 55.25 | 14.22 |
| AD-1070935.1 | 23.79 | 10.91 | 26.11 | 15.47 | 30.85 | 6.09 | 47.77 | 6.33 |
| AD-1071016.1 | 24.86 | 16.45 | 21.15 | 9.75 | 31.49 | 11.08 | 53.30 | 15.23 |
| AD-1071163.1 | 21.69 | 11.58 | 23.86 | 16.73 | 31.64 | 16.18 | 45.37 | 21.95 |
| AD-1071500.1 | 42.34 | 6.25 | 20.52 | 2.55 | 31.68 | 4.69 | 53.90 | 1.99 |
| AD-1071664.1 | 54.16 | 24.09 | 30.13 | 17.28 | 31.75 | 14.85 | 112.13 | 41.96 |
| AD-1071983.1 | 13.13 | 4.38 | 17.97 | 7.85 | 32.01 | 17.93 | 81.02 | 42.25 |
| AD-1072083.1 | 16.88 | 1.96 | 17.22 | 6.51 | 32.19 | 4.36 | 18.37 | 1.43 |
| AD-1071505.1 | 18.23 | 10.45 | 13.06 | 3.36 | 32.52 | 18.96 | 30.63 | 5.89 |
| AD-1071916.1 | 22.27 | 14.90 | 19.60 | 8.12 | 33.61 | 5.74 | 35.64 | 4.65 |
| AD-1071662.1 | 26.98 | 13.00 | 19.00 | 12.89 | 33.81 | 19.58 | 83.91 | 24.35 |
| AD-1071074.1 | 30.21 | 17.95 | 26.37 | 14.41 | 34.03 | 4.54 | 59.20 | 10.49 |
| AD-1070975.1 | 26.19 | 2.80 | 18.36 | 0.64 | 34.12 | 1.10 | 52.79 | 2.12 |
| AD-1072048.1 | 18.07 | 2.52 | 21.39 | 9.96 | 34.22 | 3.37 | 35.28 | 0.71 |
| AD-1070752.1 | 29.62 | 1.13 | 23.45 | 1.97 | 34.30 | 2.62 | 61.82 | 7.91 |
| AD-1071491.1 | 51.03 | 4.63 | 28.84 | 6.29 | 34.55 | 9.06 | 62.54 | 1.56 |
| AD-1071965.1 | 23.00 | 10.09 | 32.99 | 11.56 | 34.63 | 9.57 | 48.15 | 3.44 |
| AD-1070963.1 | 25.65 | 3.23 | 19.48 | 3.70 | 34.94 | 3.30 | 52.08 | 4.23 |
| AD-1070515.1 | 13.47 | 1.43 | 14.96 | 1.83 | 35.20 | 19.23 | 44.92 | 5.34 |
| AD-1070488.1 | 28.54 | 6.88 | 19.56 | 2.24 | 36.01 | 7.20 | 48.85 | 7.05 |
| AD-1070462.1 | 19.16 | 5.46 | 24.26 | 5.58 | 36.65 | 12.00 | 42.39 | 6.83 |
| AD-1072085.1 | 22.24 | 10.46 | 21.57 | 12.75 | 37.04 | 4.96 | 26.52 | 9.44 |
| AD-1071396.1 | 21.70 | 3.55 | 31.26 | 22.06 | 37.55 | 12.62 | 53.79 | 3.90 |
| AD-1070491.1 | 20.67 | 10.15 | 26.75 | 15.47 | 37.82 | 2.32 | 56.74 | 8.77 |
| AD-1072084.1 | 19.72 | 2.52 | 15.77 | 4.18 | 37.96 | 3.72 | 22.77 | 4.39 |
| AD-1071474.1 | 49.90 | 12.53 | 23.15 | 3.16 | 38.07 | 3.24 | 61.66 | 10.09 |
| AD-1071093.1 | 28.55 | 2.06 | 21.24 | 1.09 | 38.15 | 4.93 | 57.90 | 3.25 |
| AD-1070498.1 | 23.83 | 11.12 | 19.17 | 7.33 | 38.24 | 23.94 | 45.59 | 14.06 |
| AD-1072086.1 | 24.22 | 0.89 | 17.86 | 3.97 | 38.58 | 3.09 | 29.83 | 8.60 |
| AD-1071213.1 | 29.38 | 11.30 | 32.31 | 16.24 | 38.62 | 5.23 | 73.09 | 4.46 |
| AD-1070492.1 | 26.44 | 15.25 | 24.90 | 12.34 | 39.25 | 7.95 | 57.33 | 3.12 |
| AD-1070753.1 | 20.64 | 1.92 | 19.37 | 1.56 | 39.57 | 25.07 | 49.93 | 3.30 |
| AD-1071144.1 | 29.83 | 5.39 | 23.05 | 1.22 | 39.66 | 0.55 | 70.63 | 11.07 |
| AD-1072089.1 | 24.61 | 8.76 | 14.76 | 2.58 | 39.95 | 20.78 | 33.58 | 8.06 |
| AD-1071950.1 | 18.68 | 9.46 | 19.82 | 9.85 | 40.56 | 18.97 | 37.85 | 21.56 |
| AD-1072051.1 | 28.96 | 14.70 | 20.24 | 6.78 | 40.77 | 24.94 | 133.71 | 21.10 |
| AD-1070514.1 | 37.51 | 21.18 | 23.12 | 1.91 | 41.27 | 20.56 | 56.70 | 9.42 |
| AD-1070554.1 | 33.95 | 22.98 | 26.13 | 15.48 | 42.00 | 9.82 | 73.40 | 28.36 |
| AD-1070340.1 | 38.09 | 9.13 | 25.30 | 7.35 | 42.12 | 13.13 | 59.19 | 13.17 |
| AD-1070539.1 | 40.43 | 5.47 | 27.37 | 3.65 | 42.75 | 6.0 | 76.09 | 2.72 |
| AD-1072049.1 | 19.89 | 1.03 | 26.59 | 13.84 | 42.85 | 19.07 | 88.46 | 43.34 |
| AD-1071507.1 | 28.69 | 13.06 | 23.25 | 12.73 | 43.46 | 16.20 | 73.34 | 29.19 |
| AD-1072047.1 | 32.91 | 3.31 | 31.45 | 9.38 | 44.81 | 6.75 | 44.83 | 5.00 |
| AD-1070497.1 | 20.50 | 11.12 | 30.33 | 18.25 | 45.39 | 22.49 | 45.24 | 6.67 |
| AD-1071669.1 | 27.16 | 21.57 | 22.08 | 4.52 | 45.41 | 24.19 | 82.08 | 40.75 |
| AD-1070461.1 | 23.85 | 6.02 | 27.50 | 7.24 | 46.32 | 7.41 | 51.70 | 11.06 |
| AD-1071499.1 | 23.48 | 8.07 | 30.42 | 15.92 | 49.08 | 19.84 | 68.85 | 4.77 |
| AD-1070578.1 | 56.69 | 5.51 | 35.64 | 5.34 | 50.30 | 8.67 | 77.05 | 4.01 |
| AD-1070537.1 | 43.58 | 16.98 | 33.83 | 18.17 | 51.57 | 14.89 | 57.20 | 5.70 |
| AD-1070538.1 | 49.19 | 0.85 | 39.65 | 14.45 | 52.47 | 5.67 | 80.55 | 8.10 |
| AD-1070489.1 | 34.37 | 8.36 | 29.52 | 10.36 | 52.55 | 8.31 | 82.03 | 22.09 |
| AD-1070941.1 | 56.55 | 28.66 | 34.60 | 2.97 | 53.73 | 14.84 | 85.09 | 12.61 |
| AD-1070490.1 | 82.85 | 9.46 | 74.05 | 26.29 | 53.97 | 8.14 | 83.24 | 18.67 |
| AD-1070552.1 | 57.15 | 32.27 | 59.94 | 46.24 | 54.95 | 2.00 | 71.29 | 5.28 |
| AD-1071220.1 | 62.91 | 4.26 | 49.89 | 5.27 | 55.41 | 17.90 | 88.53 | 5.03 |
| AD-1070577.1 | 38.75 | 1.69 | 33.00 | 9.30 | 59.74 | 5.02 | 83.43 | 12.28 |
| AD-1070540.1 | 87.17 | 12.58 | 71.93 | 3.00 | 63.54 | 6.18 | 82.46 | 4.78 |
| AD-1070331.1 | 67.10 | 13.65 | 69.48 | 5.53 | 63.62 | 22.88 | 70.53 | 5.96 |
| AD-1072082.1 | 30.61 | 9.66 | 25.36 | 6.85 | 64.38 | 46.29 | 22.40 | 5.98 |
| AD-1070536.1 | 56.35 | 12.92 | 35.57 | 7.90 | 67.27 | 4.78 | 86.71 | 13.81 |
| AD-1070512.1 | 41.77 | 8.33 | 39.06 | 12.83 | 67.73 | 11.53 | 77.92 | 11.50 |
| AD-1070535.1 | 57.79 | 0.69 | 70.08 | 14.12 | 69.35 | 15.26 | 72.22 | 3.84 |
| AD-1070513.1 | 48.22 | 3.35 | 36.95 | 2.11 | 70.81 | 21.72 | 81.56 | 0.86 |
| AD-1070702.1 | 130.85 | 16.96 | 82.78 | 8.78 | 82.89 | 8.68 | 99.63 | 6.28 |
| AD-1070576.1 | 127.24 | 8.36 | 73.19 | 14.90 | 103.56 | 26.59 | 98.24 | 6.13 |

TABLE 5
In Vitro Screen in Neuro2a Cells

| | 50 nM | | 10 nM | | 1 nM | | 0.1 nM | |
|---|---|---|---|---|---|---|---|---|
| | % | | % | | % | | % | |
| Duplex | Message | | Message | | Message | | Message | |
| Name | Remaining | SD | Remaining | SD | Remaining | SD | Remaining | SD |
| AD-1071792.1 | 34.38 | 9.77 | 12.82 | 3.01 | 45.40 | 13.73 | 47.23 | 9.08 |
| AD-1071769.1 | 29.61 | 4.81 | 13.54 | 2.08 | 27.44 | 5.65 | 24.12 | 7.99 |
| AD-1071773.1 | 31.38 | 3.83 | 13.93 | 1.77 | 25.11 | 5.50 | 51.29 | 17.72 |
| AD-1071718.1 | 42.22 | 6.35 | 24.08 | 19.71 | 31.14 | 7.13 | 40.39 | 7.07 |
| AD-1071870.1 | 37.85 | 9.69 | 24.13 | 4.28 | 44.08 | 10.20 | 46.12 | 4.49 |
| AD-1071904.1 | 50.07 | 7.77 | 25.11 | 4.11 | 41.24 | 4.74 | 67.32 | 2.90 |
| AD-1071789.1 | 54.49 | 11.50 | 25.53 | 5.72 | 42.35 | 4.14 | 46.28 | 4.63 |
| AD-1071671.1 | 46.19 | 17.09 | 26.77 | 9.50 | 52.09 | 14.65 | 30.46 | 11.70 |
| AD-1071628.1 | 19.22 | 4.46 | 29.86 | 3.48 | 41.39 | 22.54 | 48.33 | 24.33 |
| AD-1071865.1 | 87.81 | 30.20 | 32.26 | 7.58 | 111.93 | 10.04 | 58.00 | 35.11 |
| AD-1071670.1 | 47.61 | 8.96 | 32.62 | 10.07 | 61.37 | 20.89 | 67.38 | 12.60 |
| AD-1071901.1 | 90.86 | 11.90 | 32.62 | 13.27 | 73.57 | 6.97 | 67.21 | 10.67 |
| AD-1071837.1 | 50.04 | 17.07 | 33.40 | 5.05 | 75.41 | 30.69 | 67.93 | 39.92 |
| AD-1071929.1 | 90.08 | 13.95 | 34.31 | 8.05 | 103.06 | 29.12 | 78.33 | 22.52 |
| AD-1071827.1 | 63.32 | 26.41 | 35.00 | 22.57 | 38.97 | 3.90 | 52.13 | 7.57 |
| AD-1071923.1 | 34.35 | 2.24 | 35.65 | 11.55 | 69.61 | 36.37 | 73.64 | 29.50 |
| AD-1071834.1 | 76.33 | 28.41 | 36.92 | 10.07 | 58.93 | 15.73 | 47.05 | 4.2 |
| AD-1071984.1 | 55.04 | 12.30 | 38.47 | 13.10 | 46.13 | 4.79 | 53.61 | 7.20 |
| AD-1071629.1 | 64.52 | 8.78 | 39.19 | 7.18 | 69.39 | 10.23 | 78.22 | 7.51 |
| AD-1071668.1 | 45.79 | 10.17 | 39.30 | 3.89 | 41.27 | 7.20 | 58.51 | 19.53 |
| AD-1070449.1 | 62.88 | 12.61 | 40.70 | 12.34 | 112.27 | 6.56 | 73.56 | 33.45 |
| AD-1071836.1 | 65.02 | 5.39 | 43.26 | 8.79 | 67.21 | 3.88 | 74.79 | 7.47 |
| AD-1071897.1 | 99.71 | 16.56 | 46.16 | 13.74 | 50.53 | 6.00 | 64.45 | 4.95 |
| AD-1071864.1 | 67.98 | 8.26 | 48.34 | 6.27 | 63.18 | 4.33 | 57.79 | 11.27 |
| AD-1071927.1 | 100.13 | 5.94 | 49.52 | 22.56 | 72.59 | 1.76 | 86.05 | 9.89 |
| AD-1070444.1 | 54.43 | 21.40 | 49.98 | 15.55 | 48.02 | 14.09 | 39.57 | 13.53 |
| AD-1071981.1 | 88.01 | 19.40 | 50.45 | 3.73 | 72.49 | 5.65 | 65.67 | 6.40 |
| AD-1071509.1 | 80.40 | 7.94 | 53.40 | 6.15 | 85.03 | 9.25 | 80.53 | 8.93 |
| AD-1071902.1 | 59.23 | 5.23 | 54.05 | 24.96 | 55.60 | 8.83 | 78.72 | 20.75 |
| AD-1071084.1 | 48.04 | 7.38 | 55.99 | 15.71 | 49.79 | 4.20 | 74.79 | 22.35 |
| AD-1071948.1 | 129.42 | 23.41 | 56.05 | 40.63 | 66.66 | 9.28 | 82.30 | 14.08 |
| AD-1071437.1 | 92.84 | 13.95 | 56.71 | 7.28 | 64.96 | 7.84 | 81.99 | 11.01 |
| AD-1071508.1 | 63.19 | 6.25 | 57.55 | 17.37 | 77.51 | 20.38 | 83.72 | 19.72 |
| AD-1071265.1 | 74.44 | 10.96 | 57.81 | 12.01 | 71.11 | 2.26 | 52.04 | 5.93 |
| AD-1070450.1 | 84.37 | 11.62 | 58.85 | 16.08 | 76.86 | 2.04 | 74.82 | 11.68 |
| AD-1070522.1 | 74.59 | 9.94 | 60.15 | 13.28 | 85.81 | 9.39 | 70.93 | 10.95 |
| AD-1071969.1 | 72.57 | 24.69 | 65.13 | 22.96 | 88.15 | 2.71 | 77.02 | 14.55 |
| AD-1071352.1 | 80.83 | 7.94 | 65.17 | 8.49 | 98.66 | 18.82 | 74.26 | 10.42 |
| AD-1071912.1 | 60.57 | 5.20 | 65.24 | 13.45 | 79.56 | 18.72 | 78.51 | 15.60 |
| AD-1071885.1 | 91.84 | 8.30 | 65.33 | 15.87 | 111.85 | 36.46 | 94.34 | 19.71 |
| AD-1071949.1 | 94.15 | 6.94 | 68.19 | 9.24 | 121.01 | 21.98 | 86.93 | 13.55 |
| AD-1071085.1 | 81.43 | 10.07 | 68.99 | 23.76 | 70.75 | 2.75 | 80.42 | 9.33 |
| AD-1070516.1 | 99.84 | 9.66 | 71.40 | 11.83 | 91.42 | 6.98 | 85.74 | 17.99 |
| AD-1071895.1 | 50.58 | 4.85 | 72.17 | 5.64 | 112.73 | 9.95 | 137.55 | 23.38 |
| AD-1071430.1 | 97.90 | 8.83 | 72.25 | 12.12 | 91.48 | 12.84 | 88.25 | 37.15 |
| AD-1070990.1 | 111.59 | 4.0 | 75.10 | 6.83 | 124.18 | 18.32 | 91.73 | 8.62 |
| AD-1071506.1 | 109.84 | 3.10 | 76.05 | 11.51 | 90.66 | 16.11 | 113.19 | 20.89 |
| AD-1071985.1 | 115.76 | 19.02 | 77.08 | 20.31 | 108.11 | 7.18 | 106.89 | 10.74 |
| AD-1070511.1 | 85.82 | 14.10 | 77.15 | 32.69 | 76.18 | 5.31 | 69.73 | 10.27 |
| AD-1071301.1 | 81.47 | 16.32 | 77.18 | 18.11 | 92.80 | 23.07 | 95.27 | 12.82 |
| AD-1071835.1 | 105.75 | 3.70 | 78.72 | 9.04 | 95.79 | 11.58 | 127.56 | 9.53 |
| AD-1072054.1 | 105.86 | 12.13 | 79.76 | 13.27 | 93.40 | 14.38 | 126.85 | 45.73 |
| AD-1070861.1 | 91.25 | 9.17 | 81.24 | 1.84 | 94.30 | 18.65 | 99.09 | 26.52 |
| AD-1071230.1 | 121.89 | 3.95 | 81.34 | 10.29 | 95.25 | 13.61 | 98.27 | 5.67 |
| AD-1071435.1 | 114.13 | 14.06 | 81.41 | 13.52 | 124.42 | 8.82 | 81.45 | 16.69 |
| AD-1070553.1 | 87.29 | 25.97 | 81.94 | 8.12 | 63.31 | 14.88 | 69.98 | 23.52 |
| AD-1071894.1 | 102.82 | 10.02 | 81.95 | 12.88 | 83.52 | 18.17 | 151.91 | 31.14 |
| AD-1071652.1 | 85.35 | 12.47 | 83.55 | 19.17 | 95.16 | 20.85 | 103.29 | 21.11 |
| AD-1072050.1 | 92.69 | 17.25 | 83.84 | 21.31 | 84.74 | 5.70 | 103.08 | 23.42 |
| AD-1072052.1 | 83.77 | 37.72 | 84.30 | 16.14 | 88.31 | 28.47 | 95.71 | 13.03 |
| AD-1071968.1 | 125.96 | 30.92 | 85.39 | 35.18 | 137.38 | 24.64 | 89.12 | 6.18 |
| AD-1071441.1 | 102.71 | 4.69 | 86.57 | 16.86 | 98.29 | 7.01 | 96.48 | 22.41 |
| AD-1071168.1 | 142.25 | 9.05 | 88.06 | 18.37 | 126.73 | 18.27 | 93.48 | 4.76 |
| AD-1070332.1 | 96.86 | 4.90 | 88.15 | 14.57 | 94.80 | 11.70 | 106.48 | 23.83 |
| AD-1070964.1 | 122.62 | 6.79 | 90.88 | 11.93 | 118.13 | 7.70 | 129.78 | 3.87 |
| AD-1070974.1 | 95.24 | 14.87 | 91.26 | 9.29 | 101.14 | 24.33 | 124.98 | 34.39 |
| AD-1070935.1 | 86.41 | 15.15 | 91.87 | 30.52 | 78.96 | 11.28 | 135.28 | 51.14 |
| AD-1071016.1 | 116.74 | 10.64 | 93.07 | 6.51 | 103.56 | 9.02 | 124.33 | 19.10 |
| AD-1071163.1 | 122.96 | 12.35 | 93.79 | 10.92 | 97.44 | 11.62 | 116.77 | 16.31 |
| AD-1071500.1 | 109.41 | 6.89 | 93.94 | 28.57 | 98.22 | 10.78 | 115.10 | 18.64 |
| AD-1071664.1 | 95.74 | 6.19 | 95.09 | 9.07 | 90.81 | 9.59 | 103.19 | 20.73 |
| AD-1071983.1 | 107.75 | 2.14 | 95.97 | 17.57 | 87.62 | 16.91 | 122.64 | 28.85 |
| AD-1072083.1 | 117.49 | 16.88 | 96.13 | 15.38 | 112.89 | 21.43 | 97.41 | 12.53 |
| AD-1071505.1 | 114.58 | 9.62 | 96.28 | 2.09 | 97.86 | 12.64 | 125.20 | 16.30 |
| AD-1071916.1 | 114.74 | 15.20 | 97.63 | 19.37 | 113.46 | 23.96 | 98.20 | 20.90 |
| AD-1071662.1 | 117.08 | 9.61 | 99.34 | 15.09 | 101.57 | 12.56 | 95.41 | 19.81 |
| AD-1071074.1 | 119.35 | 2.18 | 99.59 | 16.26 | 102.18 | 4.57 | 102.16 | 14.17 |
| AD-1070975.1 | 98.62 | 13.33 | 100.91 | 34.91 | 103.73 | 7.46 | 127.03 | 19.01 |
| AD-1072048.1 | 120.38 | 25.28 | 101.59 | 23.74 | 91.98 | 13.31 | 118.03 | 36.71 |
| AD-1070752.1 | 116.16 | 18.74 | 101.61 | 3.18 | 112.35 | 3.45 | 111.09 | 15.27 |
| AD-1071491.1 | 101.74 | 14.83 | 101.77 | 17.15 | 81.61 | 13.70 | 106.75 | 25.59 |
| AD-1071965.1 | 128.49 | 15.51 | 101.89 | 8.10 | 186.60 | 83.49 | 109.00 | 14.64 |
| AD-1070963.1 | 116.03 | 4.30 | 103.79 | 9.94 | 91.63 | 6.48 | 113.09 | 24.80 |
| AD-1070515.1 | 151.97 | 10.28 | 104.16 | 15.21 | 144.50 | 9.60 | 103.67 | 10.60 |
| AD-1070488.1 | 91.93 | 10.44 | 104.22 | 24.68 | 118.10 | 15.51 | 115.55 | 7.51 |
| AD-1070462.1 | 104.43 | 7.33 | 104.94 | 11.72 | 104.45 | 7.57 | 139.73 | 23.99 |
| AD-1072085.1 | 94.67 | 7.70 | 108.46 | 24.98 | 97.93 | 21.14 | 153.63 | 56.04 |
| AD-1071396.1 | 99.92 | 1.54 | 110.16 | 11.59 | 120.27 | 32.11 | 133.61 | 7.49 |
| AD-1070491.1 | 102.35 | 4.34 | 110.59 | 35.66 | 107.80 | 32.46 | 111.62 | 17.60 |
| AD-1072084.1 | 89.07 | 20.17 | 111.77 | 6.42 | 116.62 | 18.82 | 126.35 | 16.31 |
| AD-1071474.1 | 122.36 | 11.57 | 113.05 | 11.96 | 163.66 | 14.39 | 132.01 | 26.76 |
| AD-1071093.1 | 96.13 | 13.52 | 113.42 | 14.09 | 147.35 | 18.16 | 118.48 | 9.33 |
| AD-1070498.1 | 91.67 | 13.45 | 113.88 | 9.19 | 79.30 | 8.81 | 108.63 | 14.96 |
| AD-1072086.1 | 123.20 | 15.92 | 115.49 | 29.56 | 108.55 | 4.25 | 138.48 | 25.53 |
| AD-1071213.1 | 116.69 | 26.05 | 116.37 | 17.21 | 103.04 | 14.69 | 117.48 | 13.13 |
| AD-1070492.1 | 109.34 | 29.24 | 116.40 | 21.85 | 122.34 | 32.17 | 143.29 | 11.39 |
| AD-1070753.1 | 84.35 | 7.70 | 118.18 | 41.84 | 82.38 | 19.87 | 106.33 | 20.40 |
| AD-1071144.1 | 83.13 | 12.45 | 119.74 | 19.55 | 130.42 | 12.03 | 150.23 | 12.13 |
| AD-1072089.1 | 108.05 | 10.98 | 121.02 | 10.65 | 113.55 | 10.44 | 108.01 | 12.96 |
| AD-1071950.1 | 108.92 | 4.02 | 121.58 | 28.99 | 92.61 | 5.28 | 131.06 | 30.82 |
| AD-1072051.1 | 112.57 | 16.35 | 121.99 | 50.78 | 119.33 | 21.82 | 152.50 | 44.08 |
| AD-1070514.1 | 164.35 | 21.93 | 122.06 | 5.95 | 162.77 | 23.04 | 97.49 | 24.93 |
| AD-1070554.1 | 115.57 | 8.06 | 122.17 | 20.42 | 147.90 | 15.76 | 124.16 | 9.95 |
| AD-1070340.1 | 100.00 | 4.72 | 122.41 | 21.00 | 132.46 | 17.07 | 110.72 | 8.55 |
| AD-1070539.1 | 111.19 | 25.82 | 123.37 | 14.99 | 114.30 | 13.27 | 136.79 | 9.18 |
| AD-1072049.1 | 136.76 | 27.06 | 125.13 | 16.79 | 150.71 | 14.99 | 121.57 | 23.32 |
| AD-1071507.1 | 115.01 | 13.93 | 126.11 | 20.25 | 159.30 | 23.79 | 143.74 | 23.89 |
| AD-1072047.1 | 127.69 | 18.48 | 127.04 | 34.27 | 93.99 | 2.90 | 195.73 | 65.72 |
| AD-1070497.1 | 124.13 | 13.87 | 127.08 | 33.92 | 109.48 | 11.43 | 150.21 | 33.50 |
| AD-1071669.1 | 111.13 | 20.07 | 128.56 | 5.92 | 112.14 | 18.56 | 131.53 | 26.85 |
| AD-1070461.1 | 120.03 | 14.13 | 128.77 | 18.29 | 143.32 | 17.52 | 117.40 | 17.84 |
| AD-1071499.1 | 83.75 | 23.18 | 132.22 | 64.67 | 91.81 | 24.10 | 117.40 | 31.24 |
| AD-1070578.1 | 85.97 | 8.52 | 133.03 | 48.79 | 82.80 | 16.31 | 115.63 | 4.31 |
| AD-1070537.1 | 128.99 | 13.40 | 133.78 | 27.81 | 181.83 | 15.77 | 117.64 | 8.85 |
| AD-1070538.1 | 95.05 | 9.61 | 133.78 | 26.83 | 130.27 | 9.25 | 120.34 | 12.46 |
| AD-1070489.1 | 110.30 | 11.95 | 135.81 | 28.93 | 99.69 | 13.89 | 133.95 | 31.84 |
| AD-1070941.1 | 101.03 | 9.64 | 136.63 | 35.20 | 133.57 | 16.32 | 139.77 | 16.05 |
| AD-1070490.1 | 90.56 | 13.57 | 137.27 | 31.55 | 106.33 | 16.44 | 140.73 | 31.60 |
| AD-1070552.1 | 126.07 | 30.96 | 139.83 | 30.54 | 153.89 | 39.72 | 138.49 | 17.84 |
| AD-1071220.1 | 108.36 | 11.18 | 141.55 | 51.36 | 123.19 | 12.88 | 124.52 | 25.74 |
| AD-1070577.1 | 145.82 | 23.47 | 143.05 | 34.14 | 129.74 | 17.34 | 104.41 | 13.32 |
| AD-1070540.1 | 106.04 | 11.03 | 147.21 | 12.57 | 125.13 | 16.85 | 140.54 | 13.23 |
| AD-1070331.1 | 93.65 | 16.00 | 148.85 | 48.97 | 99.22 | 15.81 | 178.66 | 42.91 |
| AD-1072082.1 | 194.79 | 6.73 | 148.93 | 6.06 | 186.41 | 47.20 | 107.32 | 18.83 |
| AD-1070536.1 | 99.40 | 8.26 | 154.48 | 53.42 | 78.37 | 6.15 | 128.99 | 34.79 |
| AD-1070512.1 | 111.85 | 16.96 | 161.58 | 36.38 | 143.82 | 10.92 | 170.38 | 23.08 |
| AD-1070535.1 | 149.99 | 45.62 | 169.10 | 90.63 | 137.56 | 31.17 | 150.26 | 43.80 |
| AD-1070513.1 | 124.05 | 38.23 | 169.88 | 25.75 | 99.67 | 21.72 | 163.95 | 64.45 |
| AD-1070702.1 | 160.56 | 14.16 | 186.42 | 28.42 | 204.87 | 8.68 | 157.17 | 42.65 |
| AD-1070576.1 | 134.96 | 9.17 | 214.43 | 54.48 | 123.38 | 12.51 | 132.97 | 6.87 |

### Example 2. Dose Dependent Knockdown of PRNP In Vivo

[0747] To determine the appropriate dose of a dsRNA agent targeting PRNP to administer intrathecally, wild-type mice (n=4) were administered a single 50 μg, 150 μg, or 300 μg dose of an exemplary dsRNA agent targeting PRNP, AD-1070516, or control, artificial CSF (aCSF) via intracerebroventricular (ICV) injection on Day 0. The dose of dsRNA agent was administered in a volume of 10 μl and the dose of aCSF was administered in a volume of 5 μL. On Day 28 post-dose, animals were sacrificed and tissue samples were collected. The level of PRNP mLRNA was determined by qPCR in right hemisphere samples and the level of PRNP protein was determined by ELISA in left hemisphere samples.

[0748] As depicted in FIG. 1, the data demonstrate a dose dependent knockdown of PRNP mLRNA with the 50 kg group having about a 15% knockdown of PRNP mLRNA, the 150 kg group having about a 40% knockdown of PRNP mLRNA, and the 300 kg having about a 60% knockdown of PRNP mLRNA

1. A double stranded ribonucleic acid (dsRNA) agent for inhibiting expression of prion protein (PRNP) in a cell,
(a) wherein the dsRNA agent comprises a sense strand and an antisense strand forming a double stranded region,
wherein the sense strand comprises a nucleotide sequence comprising at least 15 contiguous nucleotides differing by no more than 3 nucleotides from a portion of the nucleotide sequence of SEQ ID NO: 1, and the antisense strand comprises a nucleotide sequence comprising at least 15 contiguous nucleotides differing by no more than 3 nucleotides of the corresponding portion of the nucleotide sequence of SEQ ID NO:5, and
wherein the sense strand, the antisense strand, or both the sense strand and the antisense strand is conjugated to one or more lipophilic moieties; or
(b) wherein the dsRNA agent comprises a sense strand and an antisense strand forming a double stranded region,
wherein the antisense strand comprises a region of complementarity to an mRNA encoding PRNP, and wherein the region of complementarity comprises at least 15 contiguous nucleotides differing by no more than 3 nucleotides from any one of the antisense nucleotide sequences in any one of Tables 2-3, and
wherein the sense strand, the antisense strand, or both the sense strand and the antisense strand is conjugated to one or more lipophilic moieties; or
(c) wherein the dsRNA agent comprises a sense strand and an antisense strand forming a double stranded region,
wherein the sense strand comprises at least 15 contiguous nucleotides differing by no more than three nucleotides from any one of the nucleotide sequence of nucleotides 502-524, 507-529, 502-529, 540-562, 566-588, 575-597, 576-598, 589-611, 575-611, 593-615, 594-616, 600-622, 593-622, 650-672, 858-880, 976-998, 1100-1122, 1126-1148, 1220-1242, 1221-1243, 1220-1243, 1304-1326, 1328-1350, 1410-1432, 1445-1467, 1481-1503, 1532-1554, 1610-1632, 1615-1637, 1617-1639, 1621-1643, 1610-1643, 1610-1639, 1688-1710, 1694-1714, 1830-1852, 1831-1853, 1854-1876, 1830-1853, 1872-1894, 1873-1895, 1938-1960, 2011-2033, 2015-2037, 2031-2053, 2034-2056, 2069-2091, 2076-2098, 2077-2099, 1872-1895, 2011-2037, 2069-2099, 2079-2101, 2031-2056, 2069-2098, 2138-2160, 2143-2165, 2158-2180, 2167-2189, 2168-2190, 2170-2192, 2174-2196, 2175-2197, 2177-2199, 2185-2207, 2189-2211, 2196-2218, 2200-2222, 2202-2224, 2221-2243, 2222-2244, 2223-2245, 2238-2260, 2241-2263, 2242-2264, 2138-2264, 2257-2358, 2174-2245, 2174-2224, 2138-2196, 2177-2224, 2223-2245, 2138-2189, 2177-2211, 2196-2224, 2257-2279, 2258-2280, 2335-2537, 2336-2358, 2257-2358, 2342-2364, 2397-2419, 2398-2420, 2399-2421, 2400-2422, 2401-2423, 2404-2426, 2397-2426, 2394-2423, 2397-2421, 2399-2426, and 2398-2421 of SEQ ID NO: 1, and the antisense strand comprises at least 15 contiguous nucleotides from the corresponding nucleotide sequence of SEQ ID NO:5, and
wherein the sense strand, the antisense strand, or both the sense strand and the antisense strand is conjugated to one or more lipophilic moieties; or
(d) wherein the dsRNA agent comprises a sense strand and an antisense strand forming a double stranded region, wherein the sense strand comprises at least 15 contiguous nucleotides differing by no more than three nucleotides from any one of the nucleotide sequence of nucleotides 530-570, 535-565, 539-561, 540-562, 555-605, 560-605, 560-600, 566-588, 567-589, 568-590, 569-591, 570-592, 575-597, 580-620-585-620, 589-611, 590-612, 591-613, 592-614, 593-615, 594-616, 600-650, 610-650, 613-635, 614-636, 615-637, 616-638, 617-639, 618-640, 640-680, 649-671, 650-672, 651-673, 670-700, 674-696, 675-697, 795-830, 804-826, 2325-2375, 2325-2370, 2330-2370, 2335-2357, 2336-2358, 2337-2359, 2338-2360, 2339-2361, or 2340-2362 of SEQ ID NO: 1, and the antisense strand comprises at least 15 contiguous nucleotides differing by no more than three nucleotides from the corresponding nucleotide sequence of SEQ ID NO:5, and
wherein the sense strand, the antisense strand, or both the sense strand and the antisense strand is conjugated to one or more lipophilic moieties.

2.-6. (canceled)

7. The dsRNA agent of claim 1, wherein the one or more lipophilic moieties are conjugated to one or more internal positions in the double stranded region of the dsRNA agent.

8.-20. (canceled)

21. The dsRNA agent of claim 1, wherein the one or more lipophilic moieties are conjugated to one or more of the internal positions selected from the group consisting of positions 4-8 and 13-18 on the sense strand, and positions 6-10 and 15-18 on the antisense strand, counting from the 5′end of each strand.

22.-25. (canceled)

26. The dsRNA agent of claim 1, wherein the lipophilic moiety is an aliphatic, alicyclic, or polyalicyclic compound.

27. (canceled)

28. (canceled)

29. The dsRNA agent of claim 1, wherein the lipophilic moiety contains a saturated or unsaturated C6-C18 hydrocarbon chain.

30. (canceled)

31. (canceled)

32. The dsRNA agent of claim 1, wherein the lipophilic moiety is conjugated via a carrier that replaces one or more nucleotide(s) in the internal position(s) or the double stranded region.

33.-37. (canceled)

38. The dsRNA agent of claim 1, wherein all of the nucleotides of the sense strand and all of the nucleotides of the antisense strand are modified nucleotides.

39. The dsRNA agent of claim 38, wherein at least one of the modified nucleotides is selected from the group a deoxy-nucleotide, a 3′-terminal deoxythimidine (dT) nucleotide, a 2′-O-methyl modified nucleotide, a 2′-fluoro modified nucleotide, a 2′-deoxy-modified nucleotide, a locked nucleotide, an unlocked nucleotide, a conformationally restricted nucleotide, a constrained ethyl nucleotide, an abasic nucleotide, a 2′-amino-modified nucleotide, a 2′-O-allyl-modified nucleotide, 2′-C-alkyl-modified nucleotide, 2′-hydroxly-modified nucleotide, a 2′-methoxyethyl modified nucleotide, a 2′-O-alkyl-modified nucleotide, a morpholino nucleotide, a phosphoramidate, a non-natural base comprising nucleotide, a tetrahydropyran modified nucleotide, a 1,5-anhydrohexitol modified nucleotide, a cyclohexenyl modified nucleotide, a nucleotide comprising a 5′-phosphorothioate group, a nucleotide comprising a 5′-methylphosphonate group, a nucleotide comprising a 5′ phosphate or 5′ phosphate mimic, a nucleotide comprising vinyl phosphonate, a nucleotide comprising adenosine-glycol nucleic acid (GNA), a nucleotide comprising thymidine-glycol nucleic acid (GNA)S-Isomer, a nucleotide comprising 2-hydroxymethyl-tetrahydrofurane-5-phosphate, a nucleotide comprising 2′-deoxythymidine-3′phosphate, a nucleotide comprising 2′-deoxyguanosine-3′-phosphate, and a terminal nucleotide linked to a cholesteryl derivative, a dodecanoic acid bisdecylamide group; acytidine-2′-phosphate, a guanosine-2′-phosphate, a uridine-2′-phosphate, a adenosine-2′-phosphate, a 2′-O-hexadecyl-adenosine-3′-phosphate, a 2′-O-hexadecyl-cytidine-3′-phosphate, a 2′-O-hexadecyl-guanosine-3′-phosphate, and a 2′-O-hexadecyl-uridine-3′-phosphate, and combinations thereof.

40.-45. (canceled)

46. The dsRNA agent of claim 1, further comprising at least one phosphorothioate internucleotide linkage.

47. (canceled)

48. The dsRNA agent of claim 1, wherein each strand is no more than 30 nucleotides in length.

49. The dsRNA agent of claim 1, wherein at least one strand comprises a 3′ overhang of at least 1 nucleotide.

50. (canceled)

51. The dsRNA agent of claim 1, wherein the double stranded region is 15-30 nucleotide pairs in length.

52.-62. (canceled)

63. The dsRNA agent of claim 1, wherein the 3′ end of the sense strand is protected via an end cap which is a cyclic group having an amine, said cyclic group being selected from the group consisting of pyrrolidinyl, pyrazolinyl, pyrazolidinyl, imidazolinyl, imidazolidinyl, piperidinyl, piperazinyl, [1,3]dioxolanyl, oxazolidinyl, isoxazolidinyl, morpholinyl, thiazolidinyl, isothiazolidinyl, quinoxalinyl, pyridazinonyl, tetrahydrofuranyl, and decalinyl.

64.-68. (canceled)

69. The dsRNA agent of claim 1, further comprising a phosphate or phosphate mimic at the 5′-end of the antisense strand.

70.-72. (canceled)

73. A cell containing the dsRNA agent of claim 1.

74. A pharmaceutical composition for inhibiting expression of a gene encoding prion protein (PRNP) comprising the dsRNA agent of claim 1.

75.-79. (canceled)

80. A method of inhibiting expression of a prion protein (PRNP) gene in a cell, the method comprising contacting the cell with the dsRNA agent of claim 1, thereby inhibiting expression of the PRNP gene in the cell.

81.-89. (canceled)

90. A method of treating a subject having a disorder that would benefit from reduction in PRNP expression, the method comprising administering to the subject a therapeutically effective amount of the dsRNA agent of claim 1, or the, thereby treating the subject having the disorder that would benefit from reduction in PRNP expression.

91. (canceled)

92. The method of claim 90, wherein the disorder is a PRNP-associated disease.

93.-102. (canceled)

103. The method of claim 90, wherein the subject is human.

104.-107. (canceled)

108. The method of claim 90, further comprising administering to the subject an additional agent for treatment or prevention of a PRNP-associated disorder.

The application's sequence listing, which the Patent Office published only in electronic form, follows.

SEQUENCE LISTING (662 sequences)

SEQ ID NO: 1 - DNA, 2435 bp, Homo sapiens
  source 1..2435: mol_type = other DNA
gccagtcgctgacagccgcggcgccgcgagcttctcctctcctcacgaccgaggcagagcagtcattatggcgaaccttggctgctggatgctggttctctttgtggccacatggagtgacctgggcctctgcaagaagcgcccgaagcctggaggatggaacactgggggcagccgatacccggggcagggcagccctggaggcaaccgctacccacctcagggcggtggtggctgggggcagcctcatggtggtggctgggggcagcctcatggtggtggctgggggcagccccatggtggtggctggggacagcctcatggtggtggctggggtcaaggaggtggcacccacagtcagtggaacaagccgagtaagccaaaaaccaacatgaagcacatggctggtgctgcagcagctggggcagtggtggggggccttggcggctacatgctgggaagtgccatgagcaggcccatcatacatttcggcagtgactatgaggaccgttactatcgtgaaaacatgcaccgttaccccaaccaagtgtactacaggcccatggatgagtacagcaaccagaacaactttgtgcacgactgcgtcaatatcacaatcaagcagcacacggtcaccacaaccaccaagggggagaacttcaccgagaccgacgttaagatgatggagcgcgtggttgagcagatgtgtatcacccagtacgagagggaatctcaggcctattaccagagaggatcgagcatggtcctcttctcctctccacctgtgatcctcctgatctctttcctcatcttcctgatagtgggatgaggaaggtcttcctgttttcaccatctttctaatctttttccagcttgagggaggcggtatccacctgcagcccttttagtggtggtgtctcactctttcttctctctttgtcccggataggctaatcaatacccttggcactgatgggcactggaaaacatagagtagacctgagatgctggtcaagccccctttgattgagttcatcatgagccgttgctaatgccaggccagtaaaagtataacagcaaataaccattggttaatctggacttatttttggacttagtgcaacaggttgaggctaaaacaaatctcagaacagtctgaaatacctttgcctggatacctctggctccttcagcagctagagctcagtatactaatgccctatcttagtagagatttcatagctatttagagatattttccattttaagaaaacccgacaacatttctgccaggtttgttaggaggccacatgatacttattcaaaaaaatcctagagattcttagctcttgggatgcaggctcagcccgctggagcatgagctctgtgtgtaccgagaactggggtgatgttttacttttcacagtatgggctacacagcagctgttcaacaagagtaaatattgtcacaacactgaacctctggctagaggacatattcacagtgaacataactgtaacatatatgaaaggcttctgggacttgaaatcaaatgtttgggaatggtgcccttggaggcaacctcccattttagatgtttaaaggaccctatatgtggcattcctttctttaaactataggtaattaaggcagctgaaaagtaaattgccttctagacactgaaggcaaatctcctttgtccatttacctggaaaccagaatgattttgacatacaggagagctgcagttgtgaaagcaccatcatcatagaggatgatgtaattaaaaaatggtcagtgtgcaaagaaaagaactgcttgcatttctttatttctgtctcataattgtcaaaaaccagaattaggtcaagttcatagtttctgtaattggcttttgaatcaaagaatagggagacaatctaaaaaatatcttaggttggagatgacagaaatatgattgatttgaagtggaaaaagaaattctgttaatgttaattaaagtaaaattattccctgaattgtttgatattgtcacctagcagatatgtattacttttctgcaatgttattattggcttgcactttgtgagtattctatgtaaaaatatatatgtatataaaatatatattgcataggacagacttaggagttttgtttagagcagttaacatctgaagtgtctaatgcattaacttttgtaaggtactgaatacttaatatgtgggaaacccttttgcgtggtccttaggcttacaatgtgcactgaatcgtttcatgtaagaatccaaagtggacaccattaacaggtctttgaaatatgcatgtactttatattttctatatttgtaactttgcatgttcttgttttgttatataaaaaaattgtaaatgtttaatatctgactgaaattaaacgagcgaagatgagcacca

SEQ ID NO: 2 - DNA, 3732 bp, Mus musculus
  source 1..3732: mol_type = other DNA
cccctttccactcccggctcccccgcgttgtcggatcagcagaccgattctgggcgctgcgtcgcatcggtggcaggactcctgagtatatttcagaactgaaccatttcaaccgagctgaagcattctgccttcctagtggtaccagtccaatttaggagagccaagcagactcctttgttattagacgcgttctcacgaccggccaggaagaacaccacagaccagaatcttctgcggcaaagctttatttcttacatcttcaggagccagggtgcaggaagcaagaggagcaagaagcaagagagagaagcaagagagcaagaagcaagagagagagaaaacgaaaccccgtccctcttaagcagcattctccttcgcctcggacgtgtcactccctgattggctgcagcccatcggccgagttgacgtcacggggaaggcagagcacaagtagtcataagatacccttggcacatgcgcagattatttgtttaccacttagaacacaggatgtcagcgccatcttgtaacggcgaatgtgggggcggctcccaacatctccccctatccttttaataagagcaaataggccacccatattaatgagagtggagatagaggtcaaatccccagtgtgtaggtaaaggagccatgtacaggattagctcttaggcttacaggcttttacccagagcaaccctgacctgctcccgtgtcgttttgcctgggggaagggaactaggacactgaaccttcatgaaagatgacatgtctccctagaataggctcatatatgccgcagagcctttccattgcagtgcttagccttgcaactctctcgggctgctgaagcacactcactctatcccgtgcaatgagtctagcctcatgggatataagagctgagtggccagcgacctattgcctaagcatagataaccatatatcagggggagctccatgttctagtcctgcaagcgcctgggcaataaccaccttgtctctcctagtttaggccttaagcttacagaccaatcaaagaagcaacactaatccacagcaaagtgtatctccaaataatattaatcccacccattttttaaagaaagaaaatgctgaggagatccaattgggtaatcctttggtcagcgacaggtccaagcgcgtggagttgacctgaagtctcaattcccgaaggatctgttcaaattcagccatccaattctgtaacatatactgaaaaagactttttgacaatttagctgccctagtaaatttaacatactgaatggaaataacacacaatcccggaaacttttgtttacatccctgctgagttatttgtcataatacatctagttgtatctggacaagatctatgagttgattaaccagcatgagacctctctgtatcttgacattagctgaggcctgttcatctatgactgtagtcactgaggctgacaaagtgttaatggtgtcagttgtctggacctgtccagacagagccaaggctgtctgaattaaggccaaacccagttcctagttagtggtaaaaaagcaggagaatacttgagcattatacatcaccgtcattgggagtggaaatgtcgacattattccccaacgctgctctctctttattattgacgccctggacatcaccaagacgagggacattagtattcccttggtcagtctggatttttcggatcagtcatcatggcgaaccttggctactggctgctggccctctttgtgactatgtggactgatgtcggcctctgcaaaaagcggccaaagcctggagggtggaacaccggtggaagccggtatcccgggcagggaagccctggaggcaaccgttacccacctcagggtggcacctgggggcagccccacggtggtggctggggacaaccccatgggggcagctggggacaacctcatggtggtagttggggtcagccccatggcggtggatggggccaaggagggggtacccataatcagtggaacaagcccagcaaaccaaaaaccaacctcaagcatgtggcaggggctgcggcagctggggcagtagtggggggccttggtggctacatgctggggagcgccatgagcaggcccatgatccattttggcaacgactgggaggaccgctactaccgtgaaaacatgtaccgctaccctaaccaagtgtactacaggccagtggatcagtacagcaaccagaacaacttcgtgcacgactgcgtcaatatcaccatcaagcagcacacggtcaccaccaccaccaagggggagaacttcaccgagaccgatgtgaagatgatggagcgcgtggtggagcagatgtgcgtcacccagtaccagaaggagtcccaggcctattacgacgggagaagatccagcagcaccgtgcttttctcctcccctcctgtcatcctcctcatctccttcctcatcttcctgatcgtgggatgagggaggccttcctgcttgttccttcgcattctcgtggtctaggctgggggaggggttatccacctgtagctctttcaattgaggtggttctcattcttgcttctctgtgtcccccataggctaatacccctggcactgatgggccctgggaaatgtacagtagaccagttgctctttgcttcaggtccctttgatggagtctgtcatcagccagtgctaacaccgggccaataagaatataacaccaaataactgctggctagttggggctttgttttggtctagtgaataaatactggtgtatcccctgacttgtacccagagtacaaggtgacagtgacacatgtaacttagcataggcaaagggttctacaaccaaagaagccactgtttggggatggcgccctggaaaacagcctcccacctgggatagctagagcatccacacgtggaattctttctttactaacaaacgatagctgattgaaggcaacaggaaaaaaaaaatcaaattgtcctactgacgttgaaagcaaacctttgttcattcccagggcactagaatgatctttagccttgcttggattgaactaggagatcttgactctgaggagagccagccctgtaaaaagcttggtcctcctgtgacgggagggatggttaaggtacaaaggctagaaacttgagtttcttcatttctgtctcacaattatcaaaagctagaattagcttctgccctatgtttctgtacttctatttgaactggataacagagagacaatctaaacattctcttaggctgcagataagagaagtaggctccattccaaagtgggaaagaaattctgctagcattgtttaaatcaggcaaaatttgttcctgaagttgctttttaccccagcagacataaactgcgatagcttcagcttgcactgtggattttctgtatagaatatataaaacataacttcaagcttatgtcttctttttaaaacatctgaagtatgggacgccctggccgttccatccagtactaaatgcttaccgtgtgacccttgggctttcagcgtgcactcagttccgtaggattccaaagcagacccctagctggtctttgaatctgcatgtacttcacgttttctatatttgtaactttgcatgtattttgttttgtcatataaaaagtttataaatgtttgctatcagactgacattaaatagaagctatgatgaacacctgg

SEQ ID NO: 3 - DNA, 2303 bp, Rattus norvegicus
  source 1..2303: mol_type = other DNA
tccgcccctcgccccgcccagcccccggcctgtcgggtccctcaccacgccccgctcccccgcgttgtcagagcagcagacggagtctgagcgtcgcgtcggtggcaggactcctgaatatatttcaaaactgaaccatttcaacccaactgaagtattctgccttcttagcggtaccagtccggtttaggagagccaagccgactcctctgcccttggatcctggctcagtacccagggtgaatgagatcactaagctgaaagaaggctatatttgatgaaggcacacttgtaacttgtagatcagccatcatggcgaaccttggctactggctgctggccctctttgtgactacatgtactgatgttggcctctgcaaaaagcggccaaagcctggagggtggaacactggtggaagccggtaccctgggcagggaagccctggaggcaaccgttacccacctcagagtggtggtacctgggggcagccccatggtggtggctggggacaacctcatggtggtggctggggacaacctcatggtggtggctggggtcagccccatggcgggggctggagtcaaggagggggtacccataatcagtggaacaagcccagcaagccaaaaaccaacctcaagcatgtggcaggggctgccgcagctggggcagtagtggggggccttggtggctacatgttggggagtgccatgagcaggcccatgctccattttggcaacgactgggaggaccgctactaccgagaaaacatgtaccgttaccctaaccaagtgtactacaggccggtggatcagtacagcaaccagaacaacttcgtgcacgactgtgtcaatatcaccatcaagcagcatacagtcaccaccaccaccaagggggagaacttcacggagaccgacgtgaagatgatggagcgtgtggtggagcagatgtgcgtcacccagtatcagaaggagtcccaggcctattacgacgggagaagatctagcgccgtgcttttctcctcccctcctgtgatcctcctcatctccttcctcatcttcctgatcgtgggatgaggaggccttcctgcttgttccttctcattctcgtggtctaggctgggggaggggttacccacctgtagctctttcaattgaggtggtgtctcattcttgcttctctttgtcccccataggctaatacccttggcagtgatgggtctggggaaatgtacagtagaccagatgctattcgcttcagcgtcctttgattgagtccatcatgggccagggttaacaccaggccagtaagaatataacaccaaataactgctggctagtcagggctttgttttggtctactgagtaaatactgtgtaacccctgaattgtacccagaggacatggtgacagagacacacataacttagtataggcaaagggttctatagccaaagaagccactgtgtgggcatggcaccctggaaaacagcctcccgcctgggatatctagagcatccacatgtggaattctttcttttctaacataaaccatagctgattgaaggcaacaagaaaaagaatcaaattatcctactgacattgaaagcaaactgtgttcattccctaggcgctggaatgatttttagccttggattaaaccaggagattttgactctgaggagaaccagcagtacaaaagcatggtctcctgtgatgggagagatggtgaagggacaaaggcaagacccctgcgtttcttcatttctgtctcataattatcaagagctagaattaggtcgtgccctaagtttctgtactcgtatttgaactggacaacaaagagacaatctacaaattctcttgggctgcagaggagagaaataggctccattccaaagtggaaagagaaattctgctagcattgtctaagtaaggctaacttttccttaaatcgctttgtatttcccccagcagacatcacaaccctgtgatcggttcagcctgcaccgcgggtgttctgtgtagaatatataaatataacttcaagcttaggccttctattttaaagcatctgaagtgtggaacgcactggccgttctgtgcagtactaagtgtgacccttgggctttcaatgtgcactcggttccgtatgattccaaagtagagccctagctggtcttcgaatctgcatgtacttcacgttttctatatttgtaacttcgcatgtatttgttttgtcatataaaaagtttataaatgtttgctatctgactgacattaaatagaagctatgatgagca

SEQ ID NO: 4 - DNA, 3049 bp, Macaca fascicularis
  source 1..3049: mol_type = other DNA
gagtgcattcttctcatttgttaatatcaccacctaaataacctcttgcctagaataaggagtagaaagtgaatgaacgaaggaacaggtgatggtcagtatcctttctacgcctcaaaaattaaagagtttatgtgaaaattcataaatattaatctcaatccagaataagcaaaatttttgttttcctctttagaaatttctggttgcaaaagttccagaaatttcttcctcattcccgagactttcattttctcgagttctctattatgtaacggggagctgaagctttgggccgaatttccaattaaagatgatttttacagtcaatgagccacgtcagggagcaatggcacccgcaggcggtatcaactgatgcaagtgttcaagcgaatctcaactcgttttttctggtgactcattcccggccctgcttggcagcgctgcaccctttaacttaaacctcggccggccgcccgccgcgggcaccgagtgtgcgccgggccgcgctacaattggtccccgcgccgacctccgcccgagagcgccgccgcctcccttccccgccctgcgtccctccccctcggctccgcgcgtcgcctgccctccgcgccagtcgctgacagccgcggcgccgcgagcttctcctctcctcacgaccgaggcagaacagtcatcatggcgaaccttggctgctggatgctggttctctttgtggccacatggagtgacctgggcctctgcaagaagcgcccaaagcctggaggatggaacactggaggcagccgatacccggggcagggcagccctggaggcaaccgctacccaccccagggtggtggtggctgggggcagcctcatggtggtggctgggggcaaccccatggtggcggctggggacagcctcatggtggcggctggggacagcctcatggtggtggctggggtcaaggaggtggcacccacaatcagtggcacaagcccagtaagccaaaaaccagcatgaagcacatggctggtgctgcagcagctggggcagtggtggggggccttggcggctacatgctgggaagtgccatgagcaggcccctcatacattttggcaatgactatgaggaccgttactatcgtgaaaacatgtaccgttaccccaaccaagtgtactacaggcctgtggatcagtacagcaaccagaacaactttgtgcacgactgcgtcaatatcacgattaagcagcacacagtcaccaccaccaccaaaggggagaacttcaccgagaccgacgttaagatgatggagcgcgtggttgagcagatgtgtatcacccagtacgagaaggaatcacaggcctattatcagagaggatcgagcatggtcctcttctcctccccgcctgtgatcctcctgatttctttcctcatcttcctgatagtgggatgaggaaggtcttcctgttttcaccatctttctaatctttttccaggttgagggagggagtatccatctgcagcccttttagtggtggtgtctcattcttgcttctctctttgtccctgataggctaatcaatacccttggcactgatgggcactggaaaatatagagtagacctgagatgctagtcaagccccctttgattgagttcatcatgggccgttgctaatgccgggccagtaaaagtataacagcaaataaccattggttaatctgtacttatttttggacttagtgcagcaggttgaggctaaaacaaatctcagaacagtctcaaatacctttgcctggatacctctggctccttcagcggctagagctcagtatactaatgccctgtcttagcagagatttcatagctatttagagatattttccattttaagaaaacccagcaacatttctgccaagtttgttaggaggccgcatgatactcattcaaaaaaaaatcctagaaattgttagctctcgggacactggcttggcccactggagcatgagctctgtatctacggagaactggggcaatgttttacttttcacagtaagggctacacagcagctgttcatcaagagtaaatatcggtacaacactaaacctctggctagaggacatattcacagtgaacataactgtaacatatttgaaaggcttctgggacttaaaatctaatgtttgggaatggtgccgttggaggcaacctcccgtttttgtttaaaggacctatgcgtggcattcctttctttaaactataggtaattaaggcagcagaaaagtaaattgccttctagacactgaaggcaaatctcctttgtccatttacctagaaaccagaatgattttgacataccggagagctgcagttgtgaaagcaccatcatcatagaggatgatgtaattaagaaaatggtcagtgtgcaaagaaaagaactgcttgcatttctttatttctgtctcataattgtcaaaaaccagaattaggtcaagttcatagcttctgtaattggcttttgaatcaaagaatagggagacaatctaaaaaatatcttacgttggagatgacagaaatatgattgatttgaagtggaaaaagaaattctgttaacattaattaaagtaaaattattccctgaattgtttgatattgtcacctagcagatatgtattacttttctgcaatgttattattggcttgcactttgtgagtattctatgtaaaaatatatatgtatataaaatatatattgcataggacagatttaggagttttgtttagagcagttaacatctgaagtgtctaatgcattaacttttgtaaggtactgaatacttaatatgtgggaaacccttttgcgtggtccttaggcttacaatgtgcactgaatcgttttgtataagaatccaaagtggacaccattaacaggtctttgaaatatgcatgtaatttatattttctatatttgtaactttgcatgttcttgttttgttgtataaaaaatttataaatgtttaatatctgactgaaattaaacaggagcgaagatgagcaccacc

SEQ ID NO: 5 - DNA, 2435 bp, Homo sapiens
  source 1..2435: mol_type = other DNA
tggtgctcatcttcgctcgtttaatttcagtcagatattaaacatttacaatttttttatataacaaaacaagaacatgcaaagttacaaatatagaaaatataaagtacatgcatatttcaaagacctgttaatggtgtccactttggattcttacatgaaacgattcagtgcacattgtaagcctaaggaccacgcaaaagggtttcccacatattaagtattcagtaccttacaaaagttaatgcattagacacttcagatgttaactgctctaaacaaaactcctaagtctgtcctatgcaatatatattttatatacatatatatttttacatagaatactcacaaagtgcaagccaataataacattgcagaaaagtaatacatatctgctaggtgacaatatcaaacaattcagggaataattttactttaattaacattaacagaatttctttttccacttcaaatcaatcatatttctgtcatctccaacctaagatattttttagattgtctccctattctttgattcaaaagccaattacagaaactatgaacttgacctaattctggtttttgacaattatgagacagaaataaagaaatgcaagcagttcttttctttgcacactgaccattttttaattacatcatcctctatgatgatggtgctttcacaactgcagctctcctgtatgtcaaaatcattctggtttccaggtaaatggacaaaggagatttgccttcagtgtctagaaggcaatttacttttcagctgccttaattacctatagtttaaagaaaggaatgccacatatagggtcctttaaacatctaaaatgggaggttgcctccaagggcaccattcccaaacatttgatttcaagtcccagaagcctttcatatatgttacagttatgttcactgtgaatatgtcctctagccagaggttcagtgttgtgacaatatttactcttgttgaacagctgctgtgtagcccatactgtgaaaagtaaaacatcaccccagttctcggtacacacagagctcatgctccagcgggctgagcctgcatcccaagagctaagaatctctaggatttttttgaataagtatcatgtggcctcctaacaaacctggcagaaatgttgtcgggttttcttaaaatggaaaatatctctaaatagctatgaaatctctactaagatagggcattagtatactgagctctagctgctgaaggagccagaggtatccaggcaaaggtatttcagactgttctgagatttgttttagcctcaacctgttgcactaagtccaaaaataagtccagattaaccaatggttatttgctgttatacttttactggcctggcattagcaacggctcatgatgaactcaatcaaagggggcttgaccagcatctcaggtctactctatgttttccagtgcccatcagtgccaagggtattgattagcctatccgggacaaagagagaagaaagagtgagacaccaccactaaaagggctgcaggtggataccgcctccctcaagctggaaaaagattagaaagatggtgaaaacaggaagaccttcctcatcccactatcaggaagatgaggaaagagatcaggaggatcacaggtggagaggagaagaggaccatgctcgatcctctctggtaataggcctgagattccctctcgtactgggtgatacacatctgctcaaccacgcgctccatcatcttaacgtcggtctcggtgaagttctcccccttggtggttgtggtgaccgtgtgctgcttgattgtgatattgacgcagtcgtgcacaaagttgttctggttgctgtactcatccatgggcctgtagtacacttggttggggtaacggtgcatgttttcacgatagtaacggtcctcatagtcactgccgaaatgtatgatgggcctgctcatggcacttcccagcatgtagccgccaaggccccccaccactgccccagctgctgcagcaccagccatgtgcttcatgttggtttttggcttactcggcttgttccactgactgtgggtgccacctccttgaccccagccaccaccatgaggctgtccccagccaccaccatggggctgcccccagccaccaccatgaggctgcccccagccaccaccatgaggctgcccccagccaccaccgccctgaggtgggtagcggttgcctccagggctgccctgccccgggtatcggctgcccccagtgttccatcctccaggcttcgggcgcttcttgcagaggcccaggtcactccatgtggccacaaagagaaccagcatccagcagccaaggttcgccataatgactgctctgcctcggtcgtgaggagaggagaagctcgcggcgccgcggctgtcagcgactggc

SEQ ID NO: 6 - DNA, 3732 bp, Mus musculus
  source 1..3732: mol_type = other DNA
ccaggtgttcatcatagcttctatttaatgtcagtctgatagcaaacatttataaactttttatatgacaaaacaaaatacatgcaaagttacaaatatagaaaacgtgaagtacatgcagattcaaagaccagctaggggtctgctttggaatcctacggaactgagtgcacgctgaaagcccaagggtcacacggtaagcatttagtactggatggaacggccagggcgtcccatacttcagatgttttaaaaagaagacataagcttgaagttatgttttatatattctatacagaaaatccacagtgcaagctgaagctatcgcagtttatgtctgctggggtaaaaagcaacttcaggaacaaattttgcctgatttaaacaatgctagcagaatttctttcccactttggaatggagcctacttctcttatctgcagcctaagagaatgtttagattgtctctctgttatccagttcaaatagaagtacagaaacatagggcagaagctaattctagcttttgataattgtgagacagaaatgaagaaactcaagtttctagcctttgtaccttaaccatccctcccgtcacaggaggaccaagctttttacagggctggctctcctcagagtcaagatctcctagttcaatccaagcaaggctaaagatcattctagtgccctgggaatgaacaaaggtttgctttcaacgtcagtaggacaatttgattttttttttcctgttgccttcaatcagctatcgtttgttagtaaagaaagaattccacgtgtggatgctctagctatcccaggtgggaggctgttttccagggcgccatccccaaacagtggcttctttggttgtagaaccctttgcctatgctaagttacatgtgtcactgtcaccttgtactctgggtacaagtcaggggatacaccagtatttattcactagaccaaaacaaagccccaactagccagcagttatttggtgttatattcttattggcccggtgttagcactggctgatgacagactccatcaaagggacctgaagcaaagagcaactggtctactgtacatttcccagggcccatcagtgccaggggtattagcctatgggggacacagagaagcaagaatgagaaccacctcaattgaaagagctacaggtggataacccctcccccagcctagaccacgagaatgcgaaggaacaagcaggaaggcctccctcatcccacgatcaggaagatgaggaaggagatgaggaggatgacaggaggggaggagaaaagcacggtgctgctggatcttctcccgtcgtaataggcctgggactccttctggtactgggtgacgcacatctgctccaccacgcgctccatcatcttcacatcggtctcggtgaagttctcccccttggtggtggtggtgaccgtgtgctgcttgatggtgatattgacgcagtcgtgcacgaagttgttctggttgctgtactgatccactggcctgtagtacacttggttagggtagcggtacatgttttcacggtagtagcggtcctcccagtcgttgccaaaatggatcatgggcctgctcatggcgctccccagcatgtagccaccaaggccccccactactgccccagctgccgcagcccctgccacatgcttgaggttggtttttggtttgctgggcttgttccactgattatgggtaccccctccttggccccatccaccgccatggggctgaccccaactaccaccatgaggttgtccccagctgcccccatggggttgtccccagccaccaccgtggggctgcccccaggtgccaccctgaggtgggtaacggttgcctccagggcttccctgcccgggataccggcttccaccggtgttccaccctccaggctttggccgctttttgcagaggccgacatcagtccacatagtcacaaagagggccagcagccagtagccaaggttcgccatgatgactgatccgaaaaatccagactgaccaagggaatactaatgtccctcgtcttggtgatgtccagggcgtcaataataaagagagagcagcgttggggaataatgtcgacatttccactcccaatgacggtgatgtataatgctcaagtattctcctgcttttttaccactaactaggaactgggtttggccttaattcagacagccttggctctgtctggacaggtccagacaactgacaccattaacactttgtcagcctcagtgactacagtcatagatgaacaggcctcagctaatgtcaagatacagagaggtctcatgctggttaatcaactcatagatcttgtccagatacaactagatgtattatgacaaataactcagcagggatgtaaacaaaagtttccgggattgtgtgttatttccattcagtatgttaaatttactagggcagctaaattgtcaaaaagtctttttcagtatatgttacagaattggatggctgaatttgaacagatccttcgggaattgagacttcaggtcaactccacgcgcttggacctgtcgctgaccaaaggattacccaattggatctcctcagcattttctttctttaaaaaatgggtgggattaatattatttggagatacactttgctgtggattagtgttgcttctttgattggtctgtaagcttaaggcctaaactaggagagacaaggtggttattgcccaggcgcttgcaggactagaacatggagctccccctgatatatggttatctatgcttaggcaataggtcgctggccactcagctcttatatcccatgaggctagactcattgcacgggatagagtgagtgtgcttcagcagcccgagagagttgcaaggctaagcactgcaatggaaaggctctgcggcatatatgagcctattctagggagacatgtcatctttcatgaaggttcagtgtcctagttcccttcccccaggcaaaacgacacgggagcaggtcagggttgctctgggtaaaagcctgtaagcctaagagctaatcctgtacatggctcctttacctacacactggggatttgacctctatctccactctcattaatatgggtggcctatttgctcttattaaaaggatagggggagatgttgggagccgcccccacattcgccgttacaagatggcgctgacatcctgtgttctaagtggtaaacaaataatctgcgcatgtgccaagggtatcttatgactacttgtgctctgccttccccgtgacgtcaactcggccgatgggctgcagccaatcagggagtgacacgtccgaggcgaaggagaatgctgcttaagagggacggggtttcgttttctctctctcttgcttcttgctctcttgcttctctctcttgcttcttgctcctcttgcttcctgcaccctggctcctgaagatgtaagaaataaagctttgccgcagaagattctggtctgtggtgttcttcctggccggtcgtgagaacgcgtctaataacaaaggagtctgcttggctctcctaaattggactggtaccactaggaaggcagaatgcttcagctcggttgaaatggttcagttctgaaatatactcaggagtcctgccaccgatgcgacgcagcgcccagaatcggtctgctgatccgacaacgcgggggagccgggagtggaaagggg

SEQ ID NO: 7 - DNA, 2303 bp, Rattus norvegicus
  source 1..2303: mol_type = other DNA
tgctcatcatagcttctatttaatgtcagtcagatagcaaacatttataaactttttatatgacaaaacaaatacatgcgaagttacaaatatagaaaacgtgaagtacatgcagattcgaagaccagctagggctctactttggaatcatacggaaccgagtgcacattgaaagcccaagggtcacacttagtactgcacagaacggccagtgcgttccacacttcagatgctttaaaatagaaggcctaagcttgaagttatatttatatattctacacagaacacccgcggtgcaggctgaaccgatcacagggttgtgatgtctgctgggggaaatacaaagcgatttaaggaaaagttagccttacttagacaatgctagcagaatttctctttccactttggaatggagcctatttctctcctctgcagcccaagagaatttgtagattgtctctttgttgtccagttcaaatacgagtacagaaacttagggcacgacctaattctagctcttgataattatgagacagaaatgaagaaacgcaggggtcttgcctttgtcccttcaccatctctcccatcacaggagaccatgcttttgtactgctggttctcctcagagtcaaaatctcctggtttaatccaaggctaaaaatcattccagcgcctagggaatgaacacagtttgctttcaatgtcagtaggataatttgattctttttcttgttgccttcaatcagctatggtttatgttagaaaagaaagaattccacatgtggatgctctagatatcccaggcgggaggctgttttccagggtgccatgcccacacagtggcttctttggctatagaaccctttgcctatactaagttatgtgtgtctctgtcaccatgtcctctgggtacaattcaggggttacacagtatttactcagtagaccaaaacaaagccctgactagccagcagttatttggtgttatattcttactggcctggtgttaaccctggcccatgatggactcaatcaaaggacgctgaagcgaatagcatctggtctactgtacatttccccagacccatcactgccaagggtattagcctatgggggacaaagagaagcaagaatgagacaccacctcaattgaaagagctacaggtgggtaacccctcccccagcctagaccacgagaatgagaaggaacaagcaggaaggcctcctcatcccacgatcaggaagatgaggaaggagatgaggaggatcacaggaggggaggagaaaagcacggcgctagatcttctcccgtcgtaataggcctgggactccttctgatactgggtgacgcacatctgctccaccacacgctccatcatcttcacgtcggtctccgtgaagttctcccccttggtggtggtggtgactgtatgctgcttgatggtgatattgacacagtcgtgcacgaagttgttctggttgctgtactgatccaccggcctgtagtacacttggttagggtaacggtacatgttttctcggtagtagcggtcctcccagtcgttgccaaaatggagcatgggcctgctcatggcactccccaacatgtagccaccaaggccccccactactgccccagctgcggcagcccctgccacatgcttgaggttggtttttggcttgctgggcttgttccactgattatgggtaccccctccttgactccagcccccgccatggggctgaccccagccaccaccatgaggttgtccccagccaccaccatgaggttgtccccagccaccaccatggggctgcccccaggtaccaccactctgaggtgggtaacggttgcctccagggcttccctgcccagggtaccggcttccaccagtgttccaccctccaggctttggccgctttttgcagaggccaacatcagtacatgtagtcacaaagagggccagcagccagtagccaaggttcgccatgatggctgatctacaagttacaagtgtgccttcatcaaatatagccttctttcagcttagtgatctcattcaccctgggtactgagccaggatccaagggcagaggagtcggcttggctctcctaaaccggactggtaccgctaagaaggcagaatacttcagttgggttgaaatggttcagttttgaaatatattcaggagtcctgccaccgacgcgacgctcagactccgtctgctgctctgacaacgcgggggagcggggcgtggtgagggacccgacaggccgggggctgggcggggcgaggggcgga

SEQ ID NO: 8 - DNA, 3049 bp, Macaca fascicularis
  source 1..3049: mol_type = other DNA
ggtggtgctcatcttcgctcctgtttaatttcagtcagatattaaacatttataaattttttatacaacaaaacaagaacatgcaaagttacaaatatagaaaatataaattacatgcatatttcaaagacctgttaatggtgtccactttggattcttatacaaaacgattcagtgcacattgtaagcctaaggaccacgcaaaagggtttcccacatattaagtattcagtaccttacaaaagttaatgcattagacacttcagatgttaactgctctaaacaaaactcctaaatctgtcctatgcaatatatattttatatacatatatatttttacatagaatactcacaaagtgcaagccaataataacattgcagaaaagtaatacatatctgctaggtgacaatatcaaacaattcagggaataattttactttaattaatgttaacagaatttctttttccacttcaaatcaatcatatttctgtcatctccaacgtaagatattttttagattgtctccctattctttgattcaaaagccaattacagaagctatgaacttgacctaattctggtttttgacaattatgagacagaaataaagaaatgcaagcagttcttttctttgcacactgaccattttcttaattacatcatcctctatgatgatggtgctttcacaactgcagctctccggtatgtcaaaatcattctggtttctaggtaaatggacaaaggagatttgccttcagtgtctagaaggcaatttacttttctgctgccttaattacctatagtttaaagaaaggaatgccacgcataggtcctttaaacaaaaacgggaggttgcctccaacggcaccattcccaaacattagattttaagtcccagaagcctttcaaatatgttacagttatgttcactgtgaatatgtcctctagccagaggtttagtgttgtaccgatatttactcttgatgaacagctgctgtgtagcccttactgtgaaaagtaaaacattgccccagttctccgtagatacagagctcatgctccagtgggccaagccagtgtcccgagagctaacaatttctaggatttttttttgaatgagtatcatgcggcctcctaacaaacttggcagaaatgttgctgggttttcttaaaatggaaaatatctctaaatagctatgaaatctctgctaagacagggcattagtatactgagctctagccgctgaaggagccagaggtatccaggcaaaggtatttgagactgttctgagatttgttttagcctcaacctgctgcactaagtccaaaaataagtacagattaaccaatggttatttgctgttatacttttactggcccggcattagcaacggcccatgatgaactcaatcaaagggggcttgactagcatctcaggtctactctatattttccagtgcccatcagtgccaagggtattgattagcctatcagggacaaagagagaagcaagaatgagacaccaccactaaaagggctgcagatggatactccctccctcaacctggaaaaagattagaaagatggtgaaaacaggaagaccttcctcatcccactatcaggaagatgaggaaagaaatcaggaggatcacaggcggggaggagaagaggaccatgctcgatcctctctgataataggcctgtgattccttctcgtactgggtgatacacatctgctcaaccacgcgctccatcatcttaacgtcggtctcggtgaagttctcccctttggtggtggtggtgactgtgtgctgcttaatcgtgatattgacgcagtcgtgcacaaagttgttctggttgctgtactgatccacaggcctgtagtacacttggttggggtaacggtacatgttttcacgatagtaacggtcctcatagtcattgccaaaatgtatgaggggcctgctcatggcacttcccagcatgtagccgccaaggccccccaccactgccccagctgctgcagcaccagccatgtgcttcatgctggtttttggcttactgggcttgtgccactgattgtgggtgccacctccttgaccccagccaccaccatgaggctgtccccagccgccaccatgaggctgtccccagccgccaccatggggttgcccccagccaccaccatgaggctgcccccagccaccaccaccctggggtgggtagcggttgcctccagggctgccctgccccgggtatcggctgcctccagtgttccatcctccaggctttgggcgcttcttgcagaggcccaggtcactccatgtggccacaaagagaaccagcatccagcagccaaggttcgccatgatgactgttctgcctcggtcgtgaggagaggagaagctcgcggcgccgcggctgtcagcgactggcgcggagggcaggcgacgcgcggagccgagggggagggacgcagggcggggaagggaggcggcggcgctctcgggcggaggtcggcgcggggaccaattgtagcgcggcccggcgcacactcggtgcccgcggcgggcggccggccgaggtttaagttaaagggtgcagcgctgccaagcagggccgggaatgagtcaccagaaaaaacgagttgagattcgcttgaacacttgcatcagttgataccgcctgcgggtgccattgctccctgacgtggctcattgactgtaaaaatcatctttaattggaaattcggcccaaagcttcagctccccgttacataatagagaactcgagaaaatgaaagtctcgggaatgaggaagaaatttctggaacttttgcaaccagaaatttctaaagaggaaaacaaaaattttgcttattctggattgagattaatatttatgaattttcacataaactctttaatttttgaggcgtagaaaggatactgaccatcacctgttccttcgttcattcactttctactccttattctaggcaagaggttatttaggtggtgatattaacaaatgagaagaatgcactc

SEQ ID NO: 9 - protein, 16 aa, unidentified
  REGION 1..16: note = source = /note="Description of Unknown: RFGF peptide sequence"
AAVALLPAVLLALLAP

SEQ ID NO: 10 - protein, 11 aa, unidentified
  REGION 1..11: note = source = /note="Description of Unknown: RFGF analogue sequence"
AALLPVLLAAP

SEQ ID NO: 11 - protein, 13 aa, Human immunodeficiency virus 1
GRKKRRQRRRPPQ

SEQ ID NO: 12 - protein, 16 aa, Drosophila sp.
RQIKIWFQNRRMKWKK

SEQ ID NO: 13 - RNA, 21 nt, synthetic construct
  misc_feature 1..21: note = source = /note="Description of Artificial Sequence: Synthetic oligonucleotide"
  source 1..21: mol_type = other RNA
cctagcagatatgtattacta

SEQ ID NO: 14 - RNA, 23 nt, synthetic construct
  misc_feature 1..23: note = source = /note="Description of Artificial Sequence: Synthetic oligonucleotide"
  source 1..23: mol_type = other RNA
tagtaatacatatctgctaggtg

SEQ ID NO: 15 - RNA, 21 nt, synthetic construct
  misc_feature 1..21: note = source = /note="Description of Artificial Sequence: Synthetic oligonucleotide"
  source 1..21: mol_type = other RNA
ccctgaattgtttgatattga

SEQ ID NO: 16 - RNA, 23 nt, synthetic construct
  misc_feature 1..23: note = source = /note="Description of Artificial Sequence: Synthetic oligonucleotide"
  source 1..23: mol_type = other RNA
tcaatatcaaacaattcagggaa

SEQ ID NO: 17 - RNA, 21 nt, synthetic construct
  misc_feature 1..21: note = source = /note="Description of Artificial Sequence: Synthetic oligonucleotide"
  source 1..21: mol_type = other RNA
gaattgtttgatattgtcaca

SEQ ID NO: 18 - RNA, 23 nt, synthetic construct
  misc_feature 1..23: note = source = /note="Description of Artificial Sequence: Synthetic oligonucleotide"
  source 1..23: mol_type = other RNA
tgtgacaatatcaaacaattcag

SEQ ID NO: 19 - RNA, 21 nt, synthetic construct
  misc_feature 1..21: note = source = /note="Description of Artificial Sequence: Synthetic oligonucleotide"
  source 1..21: mol_type = other RNA
ggagatgacagaaatatgata

SEQ ID NO: 20 - RNA, 23 nt, synthetic construct
  misc_feature 1..23: note = source = /note="Description of Artificial Sequence: Synthetic oligonucleotide"
  source 1..23: mol_type = other RNA
tatcatatttctgtcatctccaa

SEQ ID NO: 21 - RNA, 21 nt, synthetic construct
  misc_feature 1..21: note = source = /note="Description of Artificial Sequence: Synthetic oligonucleotide"
  source 1..21: mol_type = other RNA
ttaggagttttgtttagagca

SEQ ID NO: 22 - RNA, 23 nt, synthetic construct
  misc_feature 1..23: note = source = /note="Description of Artificial Sequence: Synthetic oligonucleotide"
  source 1..23: mol_type = other RNA
tgctctaaacaaaactcctaagt

SEQ ID NO: 23 - RNA, 21 nt, synthetic construct
  misc_feature 1..21: note = source = /note="Description of Artificial Sequence: Synthetic oligonucleotide"
  source 1..21: mol_type = other RNA
gtgtctaatgcattaacttta

SEQ ID NO: 24 - RNA, 23 nt, synthetic construct
  misc_feature 1..23: note = source = /note="Description of Artificial Sequence: Synthetic oligonucleotide"
  source 1..23: mol_type = other RNA
taaagttaatgcattagacactt

SEQ ID NO: 25 - RNA, 21 nt, synthetic construct
  misc_feature 1..21: note = source = /note="Description of Artificial Sequence: Synthetic oligonucleotide"
  source 1..21: mol_type = other RNA
tcacctagcagatatgtatta

SEQ ID NO: 26 - RNA, 23 nt, synthetic construct
  misc_feature 1..23: note = source = /note="Description of Artificial Sequence: Synthetic oligonucleotide"
  source 1..23: mol_type = other RNA
taatacatatctgctaggtgaca

SEQ ID NO: 27 - RNA, 21 nt, synthetic construct
  misc_feature 1..21: note = source = /note="Description of Artificial Sequence: Synthetic oligonucleotide"
  source 1..21: mol_type = other RNA
catagtttctgtaattggcta

SEQ ID NO: 28 - RNA, 23 nt, synthetic construct
  misc_feature 1..23: note = source = /note="Description of Artificial Sequence: Synthetic oligonucleotide"
  source 1..23: mol_type = other RNA
tagccaattacagaaactatgaa

SEQ ID NO: 29 - RNA, 21 nt, synthetic construct
  misc_feature 1..21: note = source = /note="Description of Artificial Sequence: Synthetic oligonucleotide"
  source 1..21: mol_type = other RNA
atttctgtctcataattgtca

SEQ ID NO: 30 - RNA, 23 nt, synthetic construct
  misc_feature 1..23: note = source = /note="Description of Artificial Sequence: Synthetic oligonucleotide"
  source 1..23: mol_type = other RNA
tgacaattatgagacagaaataa

SEQ ID NO: 31 - RNA, 21 nt, synthetic construct
  misc_feature 1..21: note = source = /note="Description of Artificial Sequence: Synthetic oligonucleotide"
  source 1..21: mol_type = other RNA
cagacttaggagttttgttta

SEQ ID NO: 32 - RNA, 23 nt, synthetic construct
  misc_feature 1..23: note = source = /note="Description of Artificial Sequence: Synthetic oligonucleotide"
  source 1..23: mol_type = other RNA
taaacaaaactcctaagtctgtc

SEQ ID NO: 33 - RNA, 21 nt, synthetic construct
  misc_feature 1..21: note = source = /note="Description of Artificial Sequence: Synthetic oligonucleotide"
  source 1..21: mol_type = other RNA
tcatagtttctgtaattggca

SEQ ID NO: 34 - RNA, 23 nt, synthetic construct
  misc_feature 1..23: note = source = /note="Description of Artificial Sequence: Synthetic oligonucleotide"
  source 1..23: mol_type = other RNA
tgccaattacagaaactatgaac

SEQ ID NO: 35 - RNA, 21 nt, synthetic construct
  misc_feature 1..21: note = source = /note="Description of Artificial Sequence: Synthetic oligonucleotide"
  source 1..21: mol_type = other RNA
gaagtgtctaatgcattaaca

SEQ ID NO: 36 - RNA, 23 nt, synthetic construct
  misc_feature 1..23: note = source = /note="Description of Artificial Sequence: Synthetic oligonucleotide"
  source 1..23: mol_type = other RNA
tgttaatgcattagacacttcag

SEQ ID NO: 37 - RNA, 21 nt, synthetic construct
  misc_feature 1..21: note = source = /note="Description of Artificial Sequence: Synthetic oligonucleotide"
  source 1..21: mol_type = other RNA
cactttgtgagtattctatga

SEQ ID NO: 38 - RNA, 23 nt, synthetic construct
  misc_feature 1..23: note = source = /note="Description of Artificial Sequence: Synthetic oligonucleotide"
  source 1..23: mol_type = other RNA
tcatagaatactcacaaagtgca

SEQ ID NO: 39 - RNA, 21 nt, synthetic construct
  misc_feature 1..21: note = source = /note="Description of Artificial Sequence: Synthetic oligonucleotide"
  source 1..21: mol_type = other RNA
ggtactgaatacttaatatga

SEQ ID NO: 40 - RNA, 23 nt, synthetic construct
  misc_feature 1..23: note = source = /note="Description of Artificial Sequence: Synthetic oligonucleotide"
  source 1..23: mol_type = other RNA
tcatattaagtattcagtacctt

SEQ ID NO: 41 - RNA, 21 nt, synthetic construct
  misc_feature 1..21: note = source = /note="Description of Artificial Sequence: Synthetic oligonucleotide"
  source 1..21: mol_type = other RNA
tattggcttgcactttgtgaa

SEQ ID NO: 42 - RNA, 23 nt, synthetic construct
  misc_feature 1..23: note = source = /note="Description of Artificial Sequence: Synthetic oligonucleotide"
  source 1..23: mol_type = other RNA
ttcacaaagtgcaagccaataat

SEQ ID NO: 43 - RNA, 21 nt, synthetic construct
  misc_feature 1..21: note = source = /note="Description of Artificial Sequence: Synthetic oligonucleotide"
  source 1..21: mol_type = other RNA
ttgtaaggtactgaatactta

SEQ ID NO: 44 - RNA, 23 nt, synthetic construct
  misc_feature 1..23: note = source = /note="Description of Artificial Sequence: Synthetic oligonucleotide"
  source 1..23: mol_type = other RNA
taagtattcagtaccttacaaaa

SEQ ID NO: 45 - RNA, 21 nt, synthetic construct
  misc_feature 1..21: note = source = /note="Description of Artificial Sequence: Synthetic oligonucleotide"
  source 1..21: mol_type = other RNA
ttgcactttgtgagtattcta

SEQ ID NO: 46 - RNA, 23 nt, synthetic construct
  misc_feature 1..23: note = source = /note="Description of Artificial Sequence: Synthetic oligonucleotide"
  source 1..23: mol_type = other RNA
tagaatactcacaaagtgcaagc

SEQ ID NO: 47 - RNA, 21 nt, synthetic construct
  misc_feature 1..21: note = source = /note="Description of Artificial Sequence: Synthetic oligonucleotide"
  source 1..21: mol_type = other RNA
tgtgcactgaatcgtttcata

SEQ ID NO: 48 - RNA, 23 nt, synthetic construct
  misc_feature 1..23: note = source = /note="Description of Artificial Sequence: Synthetic oligonucleotide"
  source 1..23: mol_type = other RNA
tatgaaacgattcagtgcacatt

SEQ ID NO: 49 - RNA, 21 nt, synthetic construct
  misc_feature 1..21: note = source = /note="Description of Artificial Sequence: Synthetic oligonucleotide"
  source 1..21: mol_type = other RNA
tttctgtctcataattgtcaa

SEQ ID NO: 50 - RNA, 23 nt, synthetic construct
  misc_feature 1..23: note = source = /note="Description of Artificial Sequence: Synthetic oligonucleotide"
  source 1..23: mol_type = other RNA
ttgacaattatgagacagaaata

SEQ ID NO: 51 - RNA, 21 nt, synthetic construct
  misc_feature 1..21: note = source = /note="Description of Artificial Sequence: Synthetic oligonucleotide"
  source 1..21: mol_type = other RNA
gttcatagtttctgtaattga

SEQ ID NO: 52 - RNA, 23 nt, synthetic construct
  misc_feature 1..23: note = source = /note="Description of Artificial Sequence: Synthetic oligonucleotide"
  source 1..23: mol_type = other RNA
tcaattacagaaactatgaactt

SEQ ID NO: 53 - RNA, 21 nt, synthetic construct
  misc_feature 1..21: note = source = /note="Description of Artificial Sequence: Synthetic oligonucleotide"
  source 1..21: mol_type = other RNA
cgttactatcgtgaaaacata

SEQ ID NO: 54 - RNA, 23 nt, synthetic construct
  misc_feature 1..23: note = source = /note="Description of Artificial Sequence: Synthetic oligonucleotide"
  source 1..23: mol_type = other RNA
tatgttttcacgatagtaacggt

SEQ ID NO: 55 - RNA, 21 nt, synthetic construct
  misc_feature 1..21: note = source = /note="Description of Artificial Sequence: Synthetic oligonucleotide"
  source 1..21: mol_type = other RNA
gcactttgtgagtattctata

SEQ ID NO: 56 - RNA, 23 nt, synthetic construct
  misc_feature 1..23: note = source = /note="Description of Artificial Sequence: Synthetic oligonucleotide"
  source 1..23: mol_type = other RNA
tatagaatactcacaaagtgcaa

SEQ ID NO: 57 - RNA, 21 nt, synthetic construct
  misc_feature 1..21: note = source = /note="Description of Artificial Sequence: Synthetic oligonucleotide"
  source 1..21: mol_type = other RNA
atctgaagtgtctaatgcata

SEQ ID NO: 58 - RNA, 23 nt, synthetic construct
  misc_feature 1..23: note = source = /note="Description of Artificial Sequence: Synthetic oligonucleotide"
  source 1..23: mol_type = other RNA
tatgcattagacacttcagatgt

SEQ ID NO: 59 - RNA, 21 nt, synthetic construct
  misc_feature 1..21: note = source = /note="Description of Artificial Sequence: Synthetic oligonucleotide"
  source 1..21: mol_type = other RNA
acagacttaggagttttgtta

SEQ ID NO: 60 - RNA, 23 nt, synthetic construct
  misc_feature 1..23: note = source = /note="Description of Artificial Sequence: Synthetic oligonucleotide"
  source 1..23: mol_type = other RNA
taacaaaactcctaagtctgtcc

SEQ ID NO: 61 - RNA, 21 nt, synthetic construct
  misc_feature 1..21: note = source = /note="Description of Artificial Sequence: Synthetic oligonucleotide"
  source 1..21: mol_type = other RNA
aaggtactgaatacttaataa

SEQ ID NO: 62 - RNA, 23 nt, synthetic construct
  misc_feature 1..23: note = source = /note="Description of Artificial Sequence: Synthetic oligonucleotide"
  source 1..23: mol_type = other RNA
ttattaagtattcagtaccttac

SEQ ID NO: 63 - RNA, 21 nt, synthetic construct
  misc_feature 1..21: note = source = /note="Description of Artificial Sequence: Synthetic oligonucleotide"
  source 1..21: mol_type = other RNA
aggaccgttactatcgtgaaa

SEQ ID NO: 64 - RNA, 23 nt, synthetic construct
  misc_feature 1..23: note = source = /note="Description of Artificial Sequence: Synthetic oligonucleotide"
  source 1..23: mol_type = other RNA
tttcacgatagtaacggtcctca

SEQ ID NO: 65 - RNA, 21 nt, synthetic construct
  misc_feature 1..21: note = source = /note="Description of Artificial Sequence: Synthetic oligonucleotide"
  source 1..21: mol_type = other RNA
caatgtgcactgaatcgttta

SEQ ID NO: 66 - RNA, 23 nt, synthetic construct
  misc_feature 1..23: note = source = /note="Description of Artificial Sequence: Synthetic oligonucleotide"
  source 1..23: mol_type = other RNA
taaacgattcagtgcacattgta

SEQ ID NO: 67 - RNA, 21 nt, synthetic construct
  misc_feature 1..21: note = source = /note="Description of Artificial Sequence: Synthetic oligonucleotide"
  source 1..21: mol_type = other RNA
tcctttgtccatttacctgga

SEQ ID NO: 68 - RNA, 23 nt, synthetic construct
  misc_feature 1..23: note = source = /note="Description of Artificial Sequence: Synthetic oligonucleotide"
  source 1..23: mol_type = other RNA
tccaggtaaatggacaaaggaga

SEQ ID NO: 69 - RNA, 21 nt, synthetic construct
  misc_feature 1..21: note = source = /note="Description of Artificial Sequence: Synthetic oligonucleotide"
  source 1..21: mol_type = other RNA
aagtgtctaatgcattaacta

SEQ ID NO: 70 - RNA, 23 nt, synthetic construct
  misc_feature 1..23: note = source = /note="Description of Artificial Sequence: Synthetic oligonucleotide"
  source 1..23: mol_type = other RNA
tagttaatgcattagacacttca

SEQ ID NO: 71 - RNA, 21 nt, synthetic construct
  misc_feature 1..21: note = source = /note="Description of Artificial Sequence: Synthetic oligonucleotide"
  source 1..21: mol_type = other RNA
atcttagtagagatttcataa

SEQ ID NO: 72 - RNA, 23 nt, synthetic construct
  misc_feature 1..23: note = source = /note="Description of Artificial Sequence: Synthetic oligonucleotide"
  source 1..23: mol_type = other RNA
ttatgaaatctctactaagatag

SEQ ID NO: 73 - RNA, 21 nt, synthetic construct
  misc_feature 1..21: note = source = /note="Description of Artificial Sequence: Synthetic oligonucleotide"
  source 1..21: mol_type = other RNA
gtgggaaacccttttgcgtga

SEQ ID NO: 74 - RNA, 23 nt, synthetic construct
  misc_feature 1..23: note = source = /note="Description of Artificial Sequence: Synthetic oligonucleotide"
  source 1..23: mol_type = other RNA
tcacgcaaaagggtttcccacat

SEQ ID NO: 75 - RNA, 21 nt, synthetic construct
  misc_feature 1..21: note = source = /note="Description of Artificial Sequence: Synthetic oligonucleotide"
  source 1..21: mol_type = other RNA
gcattcctttctttaaactaa

SEQ ID NO: 76 - RNA, 23 nt, synthetic construct
  misc_feature 1..23: note = source = /note="Description of Artificial Sequence: Synthetic oligonucleotide"
  source 1..23: mol_type = other RNA
ttagtttaaagaaaggaatgcca

SEQ ID NO: 77 - RNA, 21 nt, synthetic construct
  misc_feature 1..21: note = source = /note="Description of Artificial Sequence: Synthetic oligonucleotide"
  source 1..21: mol_type = other RNA
ctcctttgtccatttacctga

SEQ ID NO: 78 - RNA, 23 nt, synthetic construct
  misc_feature 1..23: note = source = /note="Description of Artificial Sequence: Synthetic oligonucleotide"
  source 1..23: mol_type = other RNA
tcaggtaaatggacaaaggagat

SEQ ID NO: 79 - RNA, 21 nt, synthetic construct
  misc_feature 1..21: note = source = /note="Description of Artificial Sequence: Synthetic oligonucleotide"
  source 1..21: mol_type = other RNA
ttcaacaagagtaaatattga

SEQ ID NO: 80 - RNA, 23 nt, synthetic construct
  misc_feature 1..23: note = source = /note="Description of Artificial Sequence: Synthetic oligonucleotide"
  source 1..23: mol_type = other RNA
tcaatatttactcttgttgaaca

SEQ ID NO: 81 - RNA, 21 nt, synthetic construct
  misc_feature 1..21: note = source = /note="Description of Artificial Sequence: Synthetic oligonucleotide"
  source 1..21: mol_type = other RNA
gttactatcgtgaaaacatga

SEQ ID NO: 82 - RNA, 23 nt, synthetic construct
  misc_feature 1..23: note = source = /note="Description of Artificial Sequence: Synthetic oligonucleotide"
  source 1..23: mol_type = other RNA
tcatgttttcacgatagtaacgg

SEQ ID NO: 83 - RNA, 21 nt, synthetic construct
  misc_feature 1..21: note = source = /note="Description of Artificial Sequence: Synthetic oligonucleotide"
  source 1..21: mol_type = other RNA
tgcgtcaatatcacaatcaaa

SEQ ID NO: 84 - RNA, 23 nt, synthetic construct
  misc_feature 1..23: note = source = /note="Description of Artificial Sequence: Synthetic oligonucleotide"
  source 1..23: mol_type = other RNA
tttgattgtgatattgacgcagt

SEQ ID NO: 85 - RNA, 21 nt, synthetic construct
  misc_feature 1..21: note = source = /note="Description of Artificial Sequence: Synthetic oligonucleotide"
  source 1..21: mol_type = other RNA
tccttaggcttacaatgtgca

SEQ ID NO: 86 - RNA, 23 nt, synthetic construct
  misc_feature 1..23: note = source = /note="Description of Artificial Sequence: Synthetic oligonucleotide"
  source 1..23: mol_type = other RNA
tgcacattgtaagcctaaggacc

SEQ ID NO: 87 - RNA, 21 nt, synthetic construct
  misc_feature 1..21: note = source = /note="Description of Artificial Sequence: Synthetic oligonucleotide"
  source 1..21: mol_type = other RNA
cttctgggacttgaaatcaaa

SEQ ID NO: 88 - RNA, 23 nt, synthetic construct
  misc_feature 1..23: note = source = /note="Description of Artificial Sequence: Synthetic oligonucleotide"
  source 1..23: mol_type = other RNA
tttgatttcaagtcccagaagcc

SEQ ID NO: 89 - RNA, 21 nt, synthetic construct
  misc_feature 1..21: note = source = /note="Description of Artificial Sequence: Synthetic oligonucleotide"
  source 1..21: mol_type = other RNA
tgcattaacttttgtaaggta

SEQ ID NO: 90 - RNA, 23 nt, synthetic construct
  misc_feature 1..23: note = source = /note="Description of Artificial Sequence: Synthetic oligonucleotide"
  source 1..23: mol_type = other RNA
taccttacaaaagttaatgcatt

SEQ ID NO: 91 - RNA, 21 nt, synthetic construct
  misc_feature 1..21: note = source = /note="Description of Artificial Sequence: Synthetic oligonucleotide"
  source 1..21: mol_type = other RNA
agagcagttaacatctgaaga

SEQ ID NO: 92 - RNA, 23 nt, synthetic construct
  misc_feature 1..23: note = source = /note="Description of Artificial Sequence: Synthetic oligonucleotide"
  source 1..23: mol_type = other RNA
tcttcagatgttaactgctctaa

SEQ ID NO: 93 - RNA, 21 nt, synthetic construct
  misc_feature 1..21: note = source = /note="Description of Artificial Sequence: Synthetic oligonucleotide"
  source 1..21: mol_type = other RNA
tgggaaacccttttgcgtgga

SEQ ID NO: 94 - RNA, 23 nt, synthetic construct
  misc_feature 1..23: note = source = /note="Description of Artificial Sequence: Synthetic oligonucleotide"
  source 1..23: mol_type = other RNA
tccacgcaaaagggtttcccaca

SEQ ID NO: 95 - RNA, 21 nt, synthetic construct
  misc_feature 1..21: note = source = /note="Description of Artificial Sequence: Synthetic oligonucleotide"
  source 1..21: mol_type = other RNA
tcttagtagagatttcataga

SEQ ID NO: 96 - RNA, 23 nt, synthetic construct
  misc_feature 1..23: note = source = /note="Description of Artificial Sequence: Synthetic oligonucleotide"
  source 1..23: mol_type = other RNA
tctatgaaatctctactaagata

SEQ ID NO: 97 - RNA, 21 nt, synthetic construct
  misc_feature 1..21: note = source = /note="Description of Artificial Sequence: Synthetic oligonucleotide"
  source 1..21: mol_type = other RNA
cacgactgcgtcaatatcaca

SEQ ID NO: 98 - RNA, 23 nt, synthetic construct
  misc_feature 1..23: note = source = /note="Description of Artificial Sequence: Synthetic oligonucleotide"
  source 1..23: mol_type = other RNA
tgtgatattgacgcagtcgtgca

SEQ ID NO: 99 - RNA, 21 nt, synthetic construct
  misc_feature 1..21: note = source = /note="Description of Artificial Sequence: Synthetic oligonucleotide"
  source 1..21: mol_type = other RNA
acatctgaagtgtctaatgca

SEQ ID NO: 100 - RNA, 23 nt, synthetic construct
  misc_feature 1..23: note = source = /note="Description of Artificial Sequence: Synthetic oligonucleotide"
  source 1..23: mol_type = other RNA
tgcattagacacttcagatgtta

SEQ ID NO: 101 - RNA, 21 nt, synthetic construct
  misc_feature 1..21: note = source = /note="Description of Artificial Sequence: Synthetic oligonucleotide"
  source 1..21: mol_type = other RNA
atatgtggcattcctttctta

SEQ ID NO: 102 - RNA, 23 nt, synthetic construct
  misc_feature 1..23: note = source = /note="Description of Artificial Sequence: Synthetic oligonucleotide"
  source 1..23: mol_type = other RNA
taagaaaggaatgccacatatag

SEQ ID NO: 103 - RNA, 21 nt, synthetic construct
  misc_feature 1..21: note = source = /note="Description of Artificial Sequence: Synthetic oligonucleotide"
  source 1..21: mol_type = other RNA
ttgaggctaaaacaaatctca

SEQ ID NO: 104 - RNA, 23 nt, synthetic construct
  misc_feature 1..23: note = source = /note="Description of Artificial Sequence: Synthetic oligonucleotide"
  source 1..23: mol_type = other RNA
tgagatttgttttagcctcaacc

SEQ ID NO: 105 - RNA, 21 nt, synthetic construct
  misc_feature 1..21: note = source = /note="Description of Artificial Sequence: Synthetic oligonucleotide"
  source 1..21: mol_type = other RNA
atctcctttgtccatttacca

SEQ ID NO: 106 - RNA, 23 nt, synthetic construct
  misc_feature 1..23: note = source = /note="Description of Artificial Sequence: Synthetic oligonucleotide"
  source 1..23: mol_type = other RNA
tggtaaatggacaaaggagattt

SEQ ID NO: 107 - RNA, 21 nt, synthetic construct
  misc_feature 1..21: note = source = /note="Description of Artificial Sequence: Synthetic oligonucleotide"
  source 1..21: mol_type = other RNA
gtgcactgaatcgtttcatga

SEQ ID NO: 108 - RNA, 23 nt, synthetic construct
  misc_feature 1..23: note = source = /note="Description of Artificial Sequence: Synthetic oligonucleotide"
  source 1..23: mol_type = other RNA
tcatgaaacgattcagtgcacat

SEQ ID NO: 109 - RNA, 21 nt, synthetic construct
  misc_feature 1..21: note = source = /note="Description of Artificial Sequence: Synthetic oligonucleotide"
  source 1..21: mol_type = other RNA
ttgtgcacgactgcgtcaata

SEQ ID NO: 110 - RNA, 23 nt, synthetic construct
  misc_feature 1..23: note = source = /note="Description of Artificial Sequence: Synthetic oligonucleotide"
  source 1..23: mol_type = other RNA
tattgacgcagtcgtgcacaaag

SEQ ID NO: 111 - RNA, 21 nt, synthetic construct
  misc_feature 1..21: note = source = /note="Description of Artificial Sequence: Synthetic oligonucleotide"
  source 1..21: mol_type = other RNA
ctggctagaggacatattcaa

SEQ ID NO: 112 - RNA, 23 nt, synthetic construct
  misc_feature 1..23: note = source = /note="Description of Artificial Sequence: Synthetic oligonucleotide"
  source 1..23: mol_type = other RNA
ttgaatatgtcctctagccagag

SEQ ID NO: 113 - RNA, 21 nt, synthetic construct
  misc_feature 1..21: note = source = /note="Description of Artificial Sequence: Synthetic oligonucleotide"
  source 1..21: mol_type = other RNA
tgcactttgtgagtattctaa

SEQ ID NO: 114 - RNA, 23 nt, synthetic construct
  misc_feature 1..23: note = source = /note="Description of Artificial Sequence: Synthetic oligonucleotide"
  source 1..23: mol_type = other RNA
ttagaatactcacaaagtgcaag

SEQ ID NO: 115 - RNA, 21 nt, synthetic construct
  misc_feature 1..21: note = source = /note="Description of Artificial Sequence: Synthetic oligonucleotide"
  source 1..21: mol_type = other RNA
atttgtaactttgcatgttca

SEQ ID NO: 116 - RNA, 23 nt, synthetic construct
  misc_feature 1..23: note = source = /note="Description of Artificial Sequence: Synthetic oligonucleotide"
  source 1..23: mol_type = other RNA
tgaacatgcaaagttacaaatat

SEQ ID NO: 117 - RNA, 21 nt, synthetic construct
  misc_feature 1..21: note = source = /note="Description of Artificial Sequence: Synthetic oligonucleotide"
  source 1..21: mol_type = other RNA
cactggaaaacatagagtaga

SEQ ID NO: 118 - RNA, 23 nt, synthetic construct
  misc_feature 1..23: note = source = /note="Description of Artificial Sequence: Synthetic oligonucleotide"
  source 1..23: mol_type = other RNA
tctactctatgttttccagtgcc

SEQ ID NO: 119 - RNA, 21 nt, synthetic construct
  misc_feature 1..21: note = source = /note="Description of Artificial Sequence: Synthetic oligonucleotide"
  source 1..21: mol_type = other RNA
ttttacttttcacagtatgga

SEQ ID NO: 120 - RNA, 23 nt, synthetic construct
  misc_feature 1..23: note = source = /note="Description of Artificial Sequence: Synthetic oligonucleotide"
  source 1..23: mol_type = other RNA
tccatactgtgaaaagtaaaaca

SEQ ID NO: 121 - RNA, 21 nt, synthetic construct
  misc_feature 1..21: note = source = /note="Description of Artificial Sequence: Synthetic oligonucleotide"
  source 1..21: mol_type = other RNA
tggcattcctttctttaaaca

SEQ ID NO: 122 - RNA, 23 nt, synthetic construct
  misc_feature 1..23: note = source = /note="Description of Artificial Sequence: Synthetic oligonucleotide"
  source 1..23: mol_type = other RNA
tgtttaaagaaaggaatgccaca

SEQ ID NO: 123 - RNA, 21 nt, synthetic construct
  misc_feature 1..21: note = source = /note="Description of Artificial Sequence: Synthetic oligonucleotide"
  source 1..21: mol_type = other RNA
ggagaacttcaccgagaccga

SEQ ID NO: 124 - RNA, 23 nt, synthetic construct
  misc_feature 1..23: note = source = /note="Description of Artificial Sequence: Synthetic oligonucleotide"
  source 1..23: mol_type = other RNA
tcggtctcggtgaagttctcccc

SEQ ID NO: 125 - RNA, 21 nt, synthetic construct
  misc_feature 1..21: note = source = /note="Description of Artificial Sequence: Synthetic oligonucleotide"
  source 1..21: mol_type = other RNA
aacatctgaagtgtctaatga

SEQ ID NO: 126 - RNA, 23 nt, synthetic construct
  misc_feature 1..23: note = source = /note="Description of Artificial Sequence: Synthetic oligonucleotide"
  source 1..23: mol_type = other RNA
tcattagacacttcagatgttaa

SEQ ID NO: 127 - RNA, 21 nt, synthetic construct
  misc_feature 1..21: note = source = /note="Description of Artificial Sequence: Synthetic oligonucleotide"
  source 1..21: mol_type = other RNA
accagaattaggtcaagttca

SEQ ID NO: 128 - RNA, 23 nt, synthetic construct
  misc_feature 1..23: note = source = /note="Description of Artificial Sequence: Synthetic oligonucleotide"
  source 1..23: mol_type = other RNA
tgaacttgacctaattctggttt

SEQ ID NO: 129 - RNA, 21 nt, synthetic construct
  misc_feature 1..21: note = source = /note="Description of Artificial Sequence: Synthetic oligonucleotide"
  source 1..21: mol_type = other RNA
ctatatttgtaactttgcata

SEQ ID NO: 130 - RNA, 23 nt, synthetic construct
  misc_feature 1..23: note = source = /note="Description of Artificial Sequence: Synthetic oligonucleotide"
  source 1..23: mol_type = other RNA
tatgcaaagttacaaatatagaa

SEQ ID NO: 131 - RNA, 21 nt, synthetic construct
  misc_feature 1..21: note = source = /note="Description of Artificial Sequence: Synthetic oligonucleotide"
  source 1..21: mol_type = other RNA
atatttgtaactttgcatgta

SEQ ID NO: 132 - RNA, 23 nt, synthetic construct
  misc_feature 1..23: note = source = /note="Description of Artificial Sequence: Synthetic oligonucleotide"
  source 1..23: mol_type = other RNA
tacatgcaaagttacaaatatag

SEQ ID NO: 133 - RNA, 21 nt, synthetic construct
  misc_feature 1..21: note = source = /note="Description of Artificial Sequence: Synthetic oligonucleotide"
  source 1..21: mol_type = other RNA
gtccttaggcttacaatgtga

SEQ ID NO: 134 - RNA, 23 nt, synthetic construct
  misc_feature 1..23: note = source = /note="Description of Artificial Sequence: Synthetic oligonucleotide"
  source 1..23: mol_type = other RNA
tcacattgtaagcctaaggacca

SEQ ID NO: 135 - RNA, 21 nt, synthetic construct
  misc_feature 1..21: note = source = /note="Description of Artificial Sequence: Synthetic oligonucleotide"
  source 1..21: mol_type = other RNA
tcctttctttaaactatagga

SEQ ID NO: 136 - RNA, 23 nt, synthetic construct
  misc_feature 1..23: note = source = /note="Description of Artificial Sequence: Synthetic oligonucleotide"
  source 1..23: mol_type = other RNA
tcctatagtttaaagaaaggaat

SEQ ID NO: 137 - RNA, 21 nt, synthetic construct
  misc_feature 1..21: note = source = /note="Description of Artificial Sequence: Synthetic oligonucleotide"
  source 1..21: mol_type = other RNA
atcctagagattcttagctca

SEQ ID NO: 138 - RNA, 23 nt, synthetic construct
  misc_feature 1..23: note = source = /note="Description of Artificial Sequence: Synthetic oligonucleotide"
  source 1..23: mol_type = other RNA
tgagctaagaatctctaggattt

SEQ ID NO: 139 - RNA, 21 nt, synthetic construct
  misc_feature 1..21: note = source = /note="Description of Artificial Sequence: Synthetic oligonucleotide"
  source 1..21: mol_type = other RNA
gtggaacaagccgagtaagca

SEQ ID NO: 140 - RNA, 23 nt, synthetic construct
  misc_feature 1..23: note = source = /note="Description of Artificial Sequence: Synthetic oligonucleotide"
  source 1..23: mol_type = other RNA
tgcttactcggcttgttccactg

SEQ ID NO: 141 - RNA, 21 nt, synthetic construct
  misc_feature 1..21: note = source = /note="Description of Artificial Sequence: Synthetic oligonucleotide"
  source 1..21: mol_type = other RNA
cttatttttggacttagtgca

SEQ ID NO: 142 - RNA, 23 nt, synthetic construct
  misc_feature 1..23: note = source = /note="Description of Artificial Sequence: Synthetic oligonucleotide"
  source 1..23: mol_type = other RNA
tgcactaagtccaaaaataagtc

SEQ ID NO: 143 - RNA, 21 nt, synthetic construct
  misc_feature 1..21: note = source = /note="Description of Artificial Sequence: Synthetic oligonucleotide"
  source 1..21: mol_type = other RNA
gacttagtgcaacaggttgaa

SEQ ID NO: 144 - RNA, 23 nt, synthetic construct
  misc_feature 1..23: note = source = /note="Description of Artificial Sequence: Synthetic oligonucleotide"
  source 1..23: mol_type = other RNA
ttcaacctgttgcactaagtcca

SEQ ID NO: 145 - RNA, 21 nt, synthetic construct
  misc_feature 1..21: note = source = /note="Description of Artificial Sequence: Synthetic oligonucleotide"
  source 1..21: mol_type = other RNA
aacagcaaataaccattggta

SEQ ID NO: 146 - RNA, 23 nt, synthetic construct
  misc_feature 1..23: note = source = /note="Description of Artificial Sequence: Synthetic oligonucleotide"
  source 1..23: mol_type = other RNA
taccaatggttatttgctgttat

SEQ ID NO: 147 - RNA, 21 nt, synthetic construct
  misc_feature 1..21: note = source = /note="Description of Artificial Sequence: Synthetic oligonucleotide"
  source 1..21: mol_type = other RNA
gtctgaaatacctttgcctga

SEQ ID NO: 148 - RNA, 23 nt, synthetic construct
  misc_feature 1..23: note = source = /note="Description of Artificial Sequence: Synthetic oligonucleotide"
  source 1..23: mol_type = other RNA
tcaggcaaaggtatttcagactg

SEQ ID NO: 149 - RNA, 21 nt, synthetic construct
  misc_feature 1..21: note = source = /note="Description of Artificial Sequence: Synthetic oligonucleotide"
  source 1..21: mol_type = other RNA
gccacatgatacttattcaaa

SEQ ID NO: 150 - RNA, 23 nt, synthetic construct
  misc_feature 1..23: note = source = /note="Description of Artificial Sequence: Synthetic oligonucleotide"
  source 1..23: mol_type = other RNA
tttgaataagtatcatgtggcct

SEQ ID NO: 151 - RNA, 21 nt, synthetic construct
  misc_feature 1..21: note = source = /note="Description of Artificial Sequence: Synthetic oligonucleotide"
  source 1..21: mol_type = other RNA
aggcaaatctcctttgtccaa

SEQ ID NO: 152 - RNA, 23 nt, synthetic construct
  misc_feature 1..23: note = source = /note="Description of Artificial Sequence: Synthetic oligonucleotide"
  source 1..23: mol_type = other RNA
ttggacaaaggagatttgccttc

SEQ ID NO: 153 - RNA, 21 nt, synthetic construct
  misc_feature 1..21: note = source = /note="Description of Artificial Sequence: Synthetic oligonucleotide"
  source 1..21: mol_type = other RNA
tcaagttcatagtttctgtaa

SEQ ID NO: 154 - RNA, 23 nt, synthetic construct
  misc_feature 1..23: note = source = /note="Description of Artificial Sequence: Synthetic oligonucleotide"
  source 1..23: mol_type = other RNA
ttacagaaactatgaacttgacc

SEQ ID NO: 155 - RNA, 21 nt, synthetic construct
  misc_feature 1..21: note = source = /note="Description of Artificial Sequence: Synthetic oligonucleotide"
  source 1..21: mol_type = other RNA
atgtgcactgaatcgtttcaa

SEQ ID NO: 156 - RNA, 23 nt, synthetic construct
  misc_feature 1..23: note = source = /note="Description of Artificial Sequence: Synthetic oligonucleotide"
  source 1..23: mol_type = other RNA
ttgaaacgattcagtgcacattg

SEQ ID NO: 157 - RNA, 21 nt, synthetic construct
  misc_feature 1..21: note = source = /note="Description of Artificial Sequence: Synthetic oligonucleotide"
  source 1..21: mol_type = other RNA
atctgactgaaattaaacgaa

SEQ ID NO: 158 - RNA, 23 nt, synthetic construct
  misc_feature 1..23: note = source = /note="Description of Artificial Sequence: Synthetic oligonucleotide"
  source 1..23: mol_type = other RNA
ttcgtttaatttcagtcagatat

SEQ ID NO: 159 - RNA, 21 nt, synthetic construct
  misc_feature 1..21: note = source = /note="Description of Artificial Sequence: Synthetic oligonucleotide"
  source 1..21: mol_type = other RNA
aatctcctttgtccatttaca

SEQ ID NO: 160 - RNA, 23 nt, synthetic construct
  misc_feature 1..23: note = source = /note="Description of Artificial Sequence: Synthetic oligonucleotide"
  source 1..23: mol_type = other RNA
tgtaaatggacaaaggagatttg

SEQ ID NO: 161 - RNA, 21 nt, synthetic construct
  misc_feature 1..21: note = source = /note="Description of Artificial Sequence: Synthetic oligonucleotide"
  source 1..21: mol_type = other RNA
ttaacttttgtaaggtactga

SEQ ID NO: 162 - RNA, 23 nt, synthetic construct
  misc_feature 1..23: note = source = /note="Description of Artificial Sequence: Synthetic oligonucleotide"
  source 1..23: mol_type = other RNA
tcagtaccttacaaaagttaatg

SEQ ID NO: 163 - RNA, 21 nt, synthetic construct
  misc_feature 1..21: note = source = /note="Description of Artificial Sequence: Synthetic oligonucleotide"
  source 1..21: mol_type = other RNA
ggtcaagttcatagtttctga

SEQ ID NO: 164 - RNA, 23 nt, synthetic construct
  misc_feature 1..23: note = source = /note="Description of Artificial Sequence: Synthetic oligonucleotide"
  source 1..23: mol_type = other RNA
tcagaaactatgaacttgaccta

SEQ ID NO: 165 - RNA, 21 nt, synthetic construct
  misc_feature 1..21: note = source = /note="Description of Artificial Sequence: Synthetic oligonucleotide"
  source 1..21: mol_type = other RNA
ctaatgccctatcttagtaga

SEQ ID NO: 166 - RNA, 23 nt, synthetic construct
  misc_feature 1..23: note = source = /note="Description of Artificial Sequence: Synthetic oligonucleotide"
  source 1..23: mol_type = other RNA
tctactaagatagggcattagta

SEQ ID NO: 167 - RNA, 21 nt, synthetic construct
  misc_feature 1..21: note = source = /note="Description of Artificial Sequence: Synthetic oligonucleotide"
  source 1..21: mol_type = other RNA
acttagtgcaacaggttgaga

SEQ ID NO: 168 - RNA, 23 nt, synthetic construct
  misc_feature 1..23: note = source = /note="Description of Artificial Sequence: Synthetic oligonucleotide"
  source 1..23: mol_type = other RNA
tctcaacctgttgcactaagtcc

SEQ ID NO: 169 - RNA, 21 nt, synthetic construct
  misc_feature 1..21: note = source = /note="Description of Artificial Sequence: Synthetic oligonucleotide"
  source 1..21: mol_type = other RNA
ttctatatttgtaactttgca

SEQ ID NO: 170 - RNA, 23 nt, synthetic construct
  misc_feature 1..23: note = source = /note="Description of Artificial Sequence: Synthetic oligonucleotide"
  source 1..23: mol_type = other RNA
tgcaaagttacaaatatagaaaa

SEQ ID NO: 171 - RNA, 21 nt, synthetic construct
  misc_feature 1..21: note = source = /note="Description of Artificial Sequence: Synthetic oligonucleotide"
  source 1..21: mol_type = other RNA
taatctttttccagcttgaga

SEQ ID NO: 172 - RNA, 23 nt, synthetic construct
  misc_feature 1..23: note = source = /note="Description of Artificial Sequence: Synthetic oligonucleotide"
  source 1..23: mol_type = other RNA
tctcaagctggaaaaagattaga

SEQ ID NO: 173 - RNA, 21 nt, synthetic construct
  misc_feature 1..21: note = source = /note="Description of Artificial Sequence: Synthetic oligonucleotide"
  source 1..21: mol_type = other RNA
agacactgaaggcaaatctca

SEQ ID NO: 174 - RNA, 23 nt, synthetic construct
  misc_feature 1..23: note = source = /note="Description of Artificial Sequence: Synthetic oligonucleotide"
  source 1..23: mol_type = other RNA
tgagatttgccttcagtgtctag

SEQ ID NO: 175 - RNA, 21 nt, synthetic construct
  misc_feature 1..21: note = source = /note="Description of Artificial Sequence: Synthetic oligonucleotide"
  source 1..21: mol_type = other RNA
gtggtccttaggcttacaata

SEQ ID NO: 176 - RNA, 23 nt, synthetic construct
  misc_feature 1..23: note = source = /note="Description of Artificial Sequence: Synthetic oligonucleotide"
  source 1..23: mol_type = other RNA
tattgtaagcctaaggaccacgc

SEQ ID NO: 177 - RNA, 21 nt, synthetic construct
  misc_feature 1..21: note = source = /note="Description of Artificial Sequence: Synthetic oligonucleotide"
  source 1..21: mol_type = other RNA
acttatttttggacttagtga

SEQ ID NO: 178 - RNA, 23 nt, synthetic construct
  misc_feature 1..23: note = source = /note="Description of Artificial Sequence: Synthetic oligonucleotide"
  source 1..23: mol_type = other RNA
tcactaagtccaaaaataagtcc

SEQ ID NO: 179 - RNA, 21 nt, synthetic construct
  misc_feature 1..21: note = source = /note="Description of Artificial Sequence: Synthetic oligonucleotide"
  source 1..21: mol_type = other RNA
gcacgactgcgtcaatatcaa

SEQ ID NO: 180 - RNA, 23 nt, synthetic construct
  misc_feature 1..23: note = source = /note="Description of Artificial Sequence: Synthetic oligonucleotide"
  source 1..23: mol_type = other RNA
ttgatattgacgcagtcgtgcac

SEQ ID NO: 181 - RNA, 21 nt, synthetic construct
  misc_feature 1..21: note = source = /note="Description of Artificial Sequence: Synthetic oligonucleotide"
  source 1..21: mol_type = other RNA
tgagtacagcaaccagaacaa

SEQ ID NO: 182 - RNA, 23 nt, synthetic construct
  misc_feature 1..23: note = source = /note="Description of Artificial Sequence: Synthetic oligonucleotide"
  source 1..23: mol_type = other RNA
ttgttctggttgctgtactcatc

SEQ ID NO: 183 - RNA, 21 nt, synthetic construct
  misc_feature 1..21: note = source = /note="Description of Artificial Sequence: Synthetic oligonucleotide"
  source 1..21: mol_type = other RNA
aaccaagtgtactacaggcca

SEQ ID NO: 184 - RNA, 23 nt, synthetic construct
  misc_feature 1..23: note = source = /note="Description of Artificial Sequence: Synthetic oligonucleotide"
  source 1..23: mol_type = other RNA
tggcctgtagtacacttggttgg

SEQ ID NO: 185 - RNA, 21 nt, synthetic construct
  misc_feature 1..21: note = source = /note="Description of Artificial Sequence: Synthetic oligonucleotide"
  source 1..21: mol_type = other RNA
ctgactgaaattaaacgagca

SEQ ID NO: 186 - RNA, 23 nt, synthetic construct
  misc_feature 1..23: note = source = /note="Description of Artificial Sequence: Synthetic oligonucleotide"
  source 1..23: mol_type = other RNA
tgctcgtttaatttcagtcagat

SEQ ID NO: 187 - RNA, 21 nt, synthetic construct
  misc_feature 1..21: note = source = /note="Description of Artificial Sequence: Synthetic oligonucleotide"
  source 1..21: mol_type = other RNA
ggcaacctcccattttagata

SEQ ID NO: 188 - RNA, 23 nt, synthetic construct
  misc_feature 1..23: note = source = /note="Description of Artificial Sequence: Synthetic oligonucleotide"
  source 1..23: mol_type = other RNA
tatctaaaatgggaggttgcctc

SEQ ID NO: 189 - RNA, 21 nt, synthetic construct
  misc_feature 1..21: note = source = /note="Description of Artificial Sequence: Synthetic oligonucleotide"
  source 1..21: mol_type = other RNA
gtacagcaaccagaacaacta

SEQ ID NO: 190 - RNA, 23 nt, synthetic construct
  misc_feature 1..23: note = source = /note="Description of Artificial Sequence: Synthetic oligonucleotide"
  source 1..23: mol_type = other RNA
tagttgttctggttgctgtactc

SEQ ID NO: 191 - RNA, 21 nt, synthetic construct
  misc_feature 1..21: note = source = /note="Description of Artificial Sequence: Synthetic oligonucleotide"
  source 1..21: mol_type = other RNA
tctgactgaaattaaacgaga

SEQ ID NO: 192 - RNA, 23 nt, synthetic construct
  misc_feature 1..23: note = source = /note="Description of Artificial Sequence: Synthetic oligonucleotide"
  source 1..23: mol_type = other RNA
tctcgtttaatttcagtcagata

SEQ ID NO: 193 - RNA, 21 nt, synthetic construct
  misc_feature 1..21: note = source = /note="Description of Artificial Sequence: Synthetic oligonucleotide"
  source 1..21: mol_type = other RNA
aaagtaaattgccttctagaa

SEQ ID NO: 194 - RNA, 23 nt, synthetic construct
  misc_feature 1..23: note = source = /note="Description of Artificial Sequence: Synthetic oligonucleotide"
  source 1..23: mol_type = other RNA
ttctagaaggcaatttacttttc

SEQ ID NO: 195 - RNA, 21 nt, synthetic construct
  misc_feature 1..21: note = source = /note="Description of Artificial Sequence: Synthetic oligonucleotide"
  source 1..21: mol_type = other RNA
gagatttcatagctatttaga

SEQ ID NO: 196 - RNA, 23 nt, synthetic construct
  misc_feature 1..23: note = source = /note="Description of Artificial Sequence: Synthetic oligonucleotide"
  source 1..23: mol_type = other RNA
tctaaatagctatgaaatctcta

SEQ ID NO: 197 - RNA, 21 nt, synthetic construct
  misc_feature 1..21: note = source = /note="Description of Artificial Sequence: Synthetic oligonucleotide"
  source 1..21: mol_type = other RNA
aaccagaacaactttgtgcaa

SEQ ID NO: 198 - RNA, 23 nt, synthetic construct
  misc_feature 1..23: note = source = /note="Description of Artificial Sequence: Synthetic oligonucleotide"
  source 1..23: mol_type = other RNA
ttgcacaaagttgttctggttgc

SEQ ID NO: 199 - RNA, 21 nt, synthetic construct
  misc_feature 1..21: note = source = /note="Description of Artificial Sequence: Synthetic oligonucleotide"
  source 1..21: mol_type = other RNA
tgactgaaattaaacgagcga

SEQ ID NO: 200 - RNA, 23 nt, synthetic construct
  misc_feature 1..23: note = source = /note="Description of Artificial Sequence: Synthetic oligonucleotide"
  source 1..23: mol_type = other RNA
tcgctcgtttaatttcagtcaga

SEQ ID NO: 201 - RNA, 21 nt, synthetic construct
  misc_feature 1..21: note = source = /note="Description of Artificial Sequence: Synthetic oligonucleotide"
  source 1..21: mol_type = other RNA
catgagctctgtgtgtaccga

SEQ ID NO: 202 - RNA, 23 nt, synthetic construct
  misc_feature 1..23: note = source = /note="Description of Artificial Sequence: Synthetic oligonucleotide"
  source 1..23: mol_type = other RNA
tcggtacacacagagctcatgct

SEQ ID NO: 203 - RNA, 21 nt, synthetic construct
  misc_feature 1..21: note = source = /note="Description of Artificial Sequence: Synthetic oligonucleotide"
  source 1..21: mol_type = other RNA
tacagcaaccagaacaactta

SEQ ID NO: 204 - RNA, 23 nt, synthetic construct
  misc_feature 1..23: note = source = /note="Description of Artificial Sequence: Synthetic oligonucleotide"
  source 1..23: mol_type = other RNA
taagttgttctggttgctgtact

SEQ ID NO: 205 - RNA, 21 nt, synthetic construct
  misc_feature 1..21: note = source = /note="Description of Artificial Sequence: Synthetic oligonucleotide"
  source 1..21: mol_type = other RNA
aatctttttccagcttgagga

SEQ ID NO: 206 - RNA, 23 nt, synthetic construct
  misc_feature 1..23: note = source = /note="Description of Artificial Sequence: Synthetic oligonucleotide"
  source 1..23: mol_type = other RNA
tcctcaagctggaaaaagattag

SEQ ID NO: 207 - RNA, 21 nt, synthetic construct
  misc_feature 1..21: note = source = /note="Description of Artificial Sequence: Synthetic oligonucleotide"
  source 1..21: mol_type = other RNA
ctgccaggtttgttaggagga

SEQ ID NO: 208 - RNA, 23 nt, synthetic construct
  misc_feature 1..23: note = source = /note="Description of Artificial Sequence: Synthetic oligonucleotide"
  source 1..23: mol_type = other RNA
tcctcctaacaaacctggcagaa

SEQ ID NO: 209 - RNA, 21 nt, synthetic construct
  misc_feature 1..21: note = source = /note="Description of Artificial Sequence: Synthetic oligonucleotide"
  source 1..21: mol_type = other RNA
ctgaaattaaacgagcgaaga

SEQ ID NO: 210 - RNA, 23 nt, synthetic construct
  misc_feature 1..23: note = source = /note="Description of Artificial Sequence: Synthetic oligonucleotide"
  source 1..23: mol_type = other RNA
tcttcgctcgtttaatttcagtc

SEQ ID NO: 211 - RNA, 21 nt, synthetic construct
  misc_feature 1..21: note = source = /note="Description of Artificial Sequence: Synthetic oligonucleotide"
  source 1..21: mol_type = other RNA
gggaaacccttttgcgtggta

SEQ ID NO: 212 - RNA, 23 nt, synthetic construct
  misc_feature 1..23: note = source = /note="Description of Artificial Sequence: Synthetic oligonucleotide"
  source 1..23: mol_type = other RNA
taccacgcaaaagggtttcccac

SEQ ID NO: 213 - RNA, 21 nt, synthetic construct
  misc_feature 1..21: note = source = /note="Description of Artificial Sequence: Synthetic oligonucleotide"
  source 1..21: mol_type = other RNA
tatatttgtaactttgcatga

SEQ ID NO: 214 - RNA, 23 nt, synthetic construct
  misc_feature 1..23: note = source = /note="Description of Artificial Sequence: Synthetic oligonucleotide"
  source 1..23: mol_type = other RNA
tcatgcaaagttacaaatataga

SEQ ID NO: 215 - RNA, 21 nt, synthetic construct
  misc_feature 1..21: note = source = /note="Description of Artificial Sequence: Synthetic oligonucleotide"
  source 1..21: mol_type = other RNA
tgcacgactgcgtcaatatca

SEQ ID NO: 216 - RNA, 23 nt, synthetic construct
  misc_feature 1..23: note = source = /note="Description of Artificial Sequence: Synthetic oligonucleotide"
  source 1..23: mol_type = other RNA
tgatattgacgcagtcgtgcaca

SEQ ID NO: 217 - RNA, 21 nt, synthetic construct
  misc_feature 1..21: note = source = /note="Description of Artificial Sequence: Synthetic oligonucleotide"
  source 1..21: mol_type = other RNA
gagaacttcaccgagaccgaa

SEQ ID NO: 218 - RNA, 23 nt, synthetic construct
  misc_feature 1..23: note = source = /note="Description of Artificial Sequence: Synthetic oligonucleotide"
  source 1..23: mol_type = other RNA
ttcggtctcggtgaagttctccc

SEQ ID NO: 219 - RNA, 21 nt, synthetic construct
  misc_feature 1..21: note = source = /note="Description of Artificial Sequence: Synthetic oligonucleotide"
  source 1..21: mol_type = other RNA
agccgagtaagccaaaaacca

SEQ ID NO: 220 - RNA, 23 nt, synthetic construct
  misc_feature 1..23: note = source = /note="Description of Artificial Sequence: Synthetic oligonucleotide"
  source 1..23: mol_type = other RNA
tggtttttggcttactcggcttg

SEQ ID NO: 221 - RNA, 21 nt, synthetic construct
  misc_feature 1..21: note = source = /note="Description of Artificial Sequence: Synthetic oligonucleotide"
  source 1..21: mol_type = other RNA
caagcagcacacggtcaccaa

SEQ ID NO: 222 - RNA, 23 nt, synthetic construct
  misc_feature 1..23: note = source = /note="Description of Artificial Sequence: Synthetic oligonucleotide"
  source 1..23: mol_type = other RNA
ttggtgaccgtgtgctgcttgat

SEQ ID NO: 223 - RNA, 21 nt, synthetic construct
  misc_feature 1..21: note = source = /note="Description of Artificial Sequence: Synthetic oligonucleotide"
  source 1..21: mol_type = other RNA
tctatatttgtaactttgcaa

SEQ ID NO: 224 - RNA, 23 nt, synthetic construct
  misc_feature 1..23: note = source = /note="Description of Artificial Sequence: Synthetic oligonucleotide"
  source 1..23: mol_type = other RNA
ttgcaaagttacaaatatagaaa

SEQ ID NO: 225 - RNA, 21 nt, synthetic construct
  misc_feature 1..21: note = source = /note="Description of Artificial Sequence: Synthetic oligonucleotide"
  source 1..21: mol_type = other RNA
tctcctttgtccatttaccta

SEQ ID NO: 226 - RNA, 23 nt, synthetic construct
  misc_feature 1..23: note = source = /note="Description of Artificial Sequence: Synthetic oligonucleotide"
  source 1..23: mol_type = other RNA
taggtaaatggacaaaggagatt

SEQ ID NO: 227 - RNA, 21 nt, synthetic construct
  misc_feature 1..21: note = source = /note="Description of Artificial Sequence: Synthetic oligonucleotide"
  source 1..21: mol_type = other RNA
tttctatatttgtaactttga

SEQ ID NO: 228 - RNA, 23 nt, synthetic construct
  misc_feature 1..23: note = source = /note="Description of Artificial Sequence: Synthetic oligonucleotide"
  source 1..23: mol_type = other RNA
tcaaagttacaaatatagaaaat

SEQ ID NO: 229 - RNA, 21 nt, synthetic construct
  misc_feature 1..21: note = source = /note="Description of Artificial Sequence: Synthetic oligonucleotide"
  source 1..21: mol_type = other RNA
caaccagaacaactttgtgca

SEQ ID NO: 230 - RNA, 23 nt, synthetic construct
  misc_feature 1..23: note = source = /note="Description of Artificial Sequence: Synthetic oligonucleotide"
  source 1..23: mol_type = other RNA
tgcacaaagttgttctggttgct

SEQ ID NO: 231 - RNA, 21 nt, synthetic construct
  misc_feature 1..21: note = source = /note="Description of Artificial Sequence: Synthetic oligonucleotide"
  source 1..21: mol_type = other RNA
ttcatagtttctgtaattgga

SEQ ID NO: 232 - RNA, 23 nt, synthetic construct
  misc_feature 1..23: note = source = /note="Description of Artificial Sequence: Synthetic oligonucleotide"
  source 1..23: mol_type = other RNA
tccaattacagaaactatgaact

SEQ ID NO: 233 - RNA, 21 nt, synthetic construct
  misc_feature 1..21: note = source = /note="Description of Artificial Sequence: Synthetic oligonucleotide"
  source 1..21: mol_type = other RNA
caaccaagtgtactacaggca

SEQ ID NO: 234 - RNA, 23 nt, synthetic construct
  misc_feature 1..23: note = source = /note="Description of Artificial Sequence: Synthetic oligonucleotide"
  source 1..23: mol_type = other RNA
tgcctgtagtacacttggttggg

SEQ ID NO: 235 - RNA, 21 nt, synthetic construct
  misc_feature 1..21: note = source = /note="Description of Artificial Sequence: Synthetic oligonucleotide"
  source 1..21: mol_type = other RNA
aaggcaaatctcctttgtcca

SEQ ID NO: 236 - RNA, 23 nt, synthetic construct
  misc_feature 1..23: note = source = /note="Description of Artificial Sequence: Synthetic oligonucleotide"
  source 1..23: mol_type = other RNA
tggacaaaggagatttgccttca

SEQ ID NO: 237 - RNA, 21 nt, synthetic construct
  misc_feature 1..21: note = source = /note="Description of Artificial Sequence: Synthetic oligonucleotide"
  source 1..21: mol_type = other RNA
aagatgatggagcgcgtggta

SEQ ID NO: 238 - RNA, 23 nt, synthetic construct
  misc_feature 1..23: note = source = /note="Description of Artificial Sequence: Synthetic oligonucleotide"
  source 1..23: mol_type = other RNA
taccacgcgctccatcatcttaa

SEQ ID NO: 239 - RNA, 21 nt, synthetic construct
  misc_feature 1..21: note = source = /note="Description of Artificial Sequence: Synthetic oligonucleotide"
  source 1..21: mol_type = other RNA
atcaagcagcacacggtcaca

SEQ ID NO: 240 - RNA, 23 nt, synthetic construct
  misc_feature 1..23: note = source = /note="Description of Artificial Sequence: Synthetic oligonucleotide"
  source 1..23: mol_type = other RNA
tgtgaccgtgtgctgcttgattg

SEQ ID NO: 241 - RNA, 21 nt, synthetic construct
  misc_feature 1..21: note = source = /note="Description of Artificial Sequence: Synthetic oligonucleotide"
  source 1..21: mol_type = other RNA
tcaagcagcacacggtcacca

SEQ ID NO: 242 - RNA, 23 nt, synthetic construct
  misc_feature 1..23: note = source = /note="Description of Artificial Sequence: Synthetic oligonucleotide"
  source 1..23: mol_type = other RNA
tggtgaccgtgtgctgcttgatt

SEQ ID NO: 243 - RNA, 21 nt, synthetic construct
  misc_feature 1..21: note = source = /note="Description of Artificial Sequence: Synthetic oligonucleotide"
  source 1..21: mol_type = other RNA
gagtacagcaaccagaacaaa

SEQ ID NO: 244 - RNA, 23 nt, synthetic construct
  misc_feature 1..23: note = source = /note="Description of Artificial Sequence: Synthetic oligonucleotide"
  source 1..23: mol_type = other RNA
tttgttctggttgctgtactcat

SEQ ID NO: 245 - RNA, 21 nt, synthetic construct
  misc_feature 1..21: note = source = /note="Description of Artificial Sequence: Synthetic oligonucleotide"
  source 1..21: mol_type = other RNA
aaataaccattggttaatcta

SEQ ID NO: 246 - RNA, 23 nt, synthetic construct
  misc_feature 1..23: note = source = /note="Description of Artificial Sequence: Synthetic oligonucleotide"
  source 1..23: mol_type = other RNA
tagattaaccaatggttatttgc

SEQ ID NO: 247 - RNA, 21 nt, synthetic construct
  misc_feature 1..21: note = source = /note="Description of Artificial Sequence: Synthetic oligonucleotide"
  source 1..21: mol_type = other RNA
agtacagcaaccagaacaaca

SEQ ID NO: 248 - RNA, 23 nt, synthetic construct
  misc_feature 1..23: note = source = /note="Description of Artificial Sequence: Synthetic oligonucleotide"
  source 1..23: mol_type = other RNA
tgttgttctggttgctgtactca

SEQ ID NO: 249 - RNA, 21 nt, synthetic construct
  misc_feature 1..21: note = source = /note="Description of Artificial Sequence: Synthetic oligonucleotide"
  source 1..21: mol_type = other RNA
gggagaacttcaccgagacca

SEQ ID NO: 250 - RNA, 23 nt, synthetic construct
  misc_feature 1..23: note = source = /note="Description of Artificial Sequence: Synthetic oligonucleotide"
  source 1..23: mol_type = other RNA
tggtctcggtgaagttctccccc

SEQ ID NO: 251 - RNA, 21 nt, synthetic construct
  misc_feature 1..21: note = source = /note="Description of Artificial Sequence: Synthetic oligonucleotide"
  source 1..21: mol_type = other RNA
tctgtgtgtaccgagaactga

SEQ ID NO: 252 - RNA, 23 nt, synthetic construct
  misc_feature 1..23: note = source = /note="Description of Artificial Sequence: Synthetic oligonucleotide"
  source 1..23: mol_type = other RNA
tcagttctcggtacacacagagc

SEQ ID NO: 253 - RNA, 21 nt, synthetic construct
  misc_feature 1..21: note = source = /note="Description of Artificial Sequence: Synthetic oligonucleotide"
  source 1..21: mol_type = other RNA
taagatgatggagcgcgtgga

SEQ ID NO: 254 - RNA, 23 nt, synthetic construct
  misc_feature 1..23: note = source = /note="Description of Artificial Sequence: Synthetic oligonucleotide"
  source 1..23: mol_type = other RNA
tccacgcgctccatcatcttaac

SEQ ID NO: 255 - RNA, 21 nt, synthetic construct
  misc_feature 1..21: note = source = /note="Description of Artificial Sequence: Synthetic oligonucleotide"
  source 1..21: mol_type = other RNA
aagcagcacacggtcaccaca

SEQ ID NO: 256 - RNA, 23 nt, synthetic construct
  misc_feature 1..23: note = source = /note="Description of Artificial Sequence: Synthetic oligonucleotide"
  source 1..23: mol_type = other RNA
tgtggtgaccgtgtgctgcttga

SEQ ID NO: 257 - RNA, 21 nt, synthetic construct
  misc_feature 1..21: note = source = /note="Description of Artificial Sequence: Synthetic oligonucleotide"
  source 1..21: mol_type = other RNA
agtggaacaagccgagtaaga

SEQ ID NO: 258 - RNA, 23 nt, synthetic construct
  misc_feature 1..23: note = source = /note="Description of Artificial Sequence: Synthetic oligonucleotide"
  source 1..23: mol_type = other RNA
tcttactcggcttgttccactga

SEQ ID NO: 259 - RNA, 21 nt, synthetic construct
  misc_feature 1..21: note = source = /note="Description of Artificial Sequence: Synthetic oligonucleotide"
  source 1..21: mol_type = other RNA
tatctgactgaaattaaacga

SEQ ID NO: 260 - RNA, 23 nt, synthetic construct
  misc_feature 1..23: note = source = /note="Description of Artificial Sequence: Synthetic oligonucleotide"
  source 1..23: mol_type = other RNA
tcgtttaatttcagtcagatatt

SEQ ID NO: 261 - RNA, 21 nt, synthetic construct
  misc_feature 1..21: note = source = /note="Description of Artificial Sequence: Synthetic oligonucleotide"
  source 1..21: mol_type = other RNA
aatcaagcagcacacggtcaa

SEQ ID NO: 262 - RNA, 23 nt, synthetic construct
  misc_feature 1..23: note = source = /note="Description of Artificial Sequence: Synthetic oligonucleotide"
  source 1..23: mol_type = other RNA
ttgaccgtgtgctgcttgattgt

SEQ ID NO: 263 - RNA, 21 nt, synthetic construct
  misc_feature 1..21: note = source = /note="Description of Artificial Sequence: Synthetic oligonucleotide"
  source 1..21: mol_type = other RNA
tgtgcacgactgcgtcaataa

SEQ ID NO: 264 - RNA, 23 nt, synthetic construct
  misc_feature 1..23: note = source = /note="Description of Artificial Sequence: Synthetic oligonucleotide"
  source 1..23: mol_type = other RNA
ttattgacgcagtcgtgcacaaa

SEQ ID NO: 265 - RNA, 21 nt, synthetic construct
  misc_feature 1..21: note = source = /note="Description of Artificial Sequence: Synthetic oligonucleotide"
  source 1..21: mol_type = other RNA
caatcaagcagcacacggtca

SEQ ID NO: 266 - RNA, 23 nt, synthetic construct
  misc_feature 1..23: note = source = /note="Description of Artificial Sequence: Synthetic oligonucleotide"
  source 1..23: mol_type = other RNA
tgaccgtgtgctgcttgattgtg

SEQ ID NO: 267 - RNA, 21 nt, synthetic construct
  misc_feature 1..21: note = source = /note="Description of Artificial Sequence: Synthetic oligonucleotide"
  source 1..21: mol_type = other RNA
gtgcacgactgcgtcaatata

SEQ ID NO: 268 - RNA, 23 nt, synthetic construct
  misc_feature 1..23: note = source = /note="Description of Artificial Sequence: Synthetic oligonucleotide"
  source 1..23: mol_type = other RNA
tatattgacgcagtcgtgcacaa

SEQ ID NO: 269 - RNA, 21 nt, synthetic construct
  misc_feature 1..21: note = source = /note="Description of Artificial Sequence: Synthetic oligonucleotide"
  source 1..21: mol_type = other RNA
ctcatcttcctgatagtggga

SEQ ID NO: 270 - RNA, 23 nt, synthetic construct
  misc_feature 1..23: note = source = /note="Description of Artificial Sequence: Synthetic oligonucleotide"
  source 1..23: mol_type = other RNA
tcccactatcaggaagatgagga

SEQ ID NO: 271 - RNA, 21 nt, synthetic construct
  misc_feature 1..21: note = source = /note="Description of Artificial Sequence: Synthetic oligonucleotide"
  source 1..21: mol_type = other RNA
ttaagatgatggagcgcgtga

SEQ ID NO: 272 - RNA, 23 nt, synthetic construct
  misc_feature 1..23: note = source = /note="Description of Artificial Sequence: Synthetic oligonucleotide"
  source 1..23: mol_type = other RNA
tcacgcgctccatcatcttaacg

SEQ ID NO: 273 - RNA, 21 nt, synthetic construct
  source 1..21: mol_type = other RNA
  modified_base 1: mod_base = OTHER; note = 2'-O-methylcytidine-3'-phosphorothioate
  modified_base 2: mod_base = OTHER; note = 2'-O-methylcytidine-3'-phosphorothioate
  modified_base 3: mod_base = OTHER; note = 2'-O-methyluridine-3'-phosphate
  modified_base 4: mod_base = OTHER; note = 2'-O-methyladenosine-3'-phosphate
  modified_base 5: mod_base = OTHER; note = 2'-O-methylguanosine-3'-phosphate
  modified_base 6: mod_base = OTHER; note = 2'-O-hexadecyl-cytidine-3'-phosphate
  modified_base 7: mod_base = OTHER; note = 2'-deoxy-2'-fluoroadenosine-3'-phosphate
  modified_base 8: mod_base = OTHER; note = 2'-O-methylguanosine-3'-phosphate
  modified_base 9: mod_base = OTHER; note = 2'-deoxy-2'-fluoroadenosine-3'-phosphate
  modified_base 10: mod_base = OTHER; note = 2'-deoxy-2'-fluorouridine-3'-phosphate
  modified_base 11: mod_base = OTHER; note = 2'-deoxy-2'-fluoroadenosine-3'-phosphate
  modified_base 12: mod_base = OTHER; note = 2'-O-methyluridine-3'-phosphate
  modified_base 13: mod_base = OTHER; note = 2'-O-methylguanosine-3'-phosphate
  modified_base 14: mod_base = OTHER; note = 2'-O-methyluridine-3'-phosphate
  modified_base 15: mod_base = OTHER; note = 2'-O-methyladenosine-3'-phosphate
  modified_base 16: mod_base = OTHER; note = 2'-O-methyluridine-3'-phosphate
  modified_base 17: mod_base = OTHER; note = 2'-O-methyluridine-3'-phosphate
  modified_base 18: mod_base = OTHER; note = 2'-O-methyladenosine-3'-phosphate
  modified_base 19: mod_base = OTHER; note = 2'-O-methylcytidine-3'-phosphorothioate
  modified_base 20: mod_base = OTHER; note = 2'-O-methyluridine-3'-phosphorothioate
  modified_base 21: mod_base = OTHER; note = 2'-O-methyladenosine
cctagcagatatgtattacta

SEQ ID NO: 274 - RNA, 23 nt, synthetic construct
  source 1..23: mol_type = other RNA
  modified_base 1: mod_base = OTHER; note = 2'-O-methyluridine-3'-phosphorothioate 5'-(E)-Vinylphosphonate
  modified_base 2: mod_base = OTHER; note = 2'-deoxy-2'-fluoroadenosine-3'-phosphorothioate
  modified_base 3: mod_base = OTHER; note = 2'-O-methylguanosine-3'-phosphate
  modified_base 4: mod_base = OTHER; note = 2'-O-methyluridine-3'-phosphate
  modified_base 5: mod_base = OTHER; note = 2'-O-methyladenosine-3'-phosphate
  modified_base 6: mod_base = OTHER; note = 2'-deoxy-2'-fluoroadenosine-3'-phosphate
  modified_base 7: mod_base = OTHER; note = 2'-O-methyluridine-3'-phosphate
  modified_base 8: mod_base = OTHER; note = 2'-deoxy-2'-fluoroadenosine-3'-phosphate
  modified_base 9: mod_base = OTHER; note = 2'-deoxy-2'-fluorocytidine-3'-phosphate
  modified_base 10: mod_base = OTHER; note = 2'-O-methyladenosine-3'-phosphate
  modified_base 11: mod_base = OTHER; note = 2'-O-methyluridine-3'-phosphate
  modified_base 12: mod_base = OTHER; note = 2'-O-methyladenosine-3'-phosphate
  modified_base 13: mod_base = OTHER; note = 2'-O-methyluridine-3'-phosphate
  modified_base 14: mod_base = OTHER; note = 2'-deoxy-2'-fluorocytidine-3'-phosphate
  modified_base 15: mod_base = OTHER; note = 2'-O-methyluridine-3'-phosphate
  modified_base 16: mod_base = OTHER; note = 2'-deoxy-2'-fluoroguanosine-3'-phosphate
  modified_base 17: mod_base = OTHER; note = 2'-O-methylcytidine-3'-phosphate
  modified_base 18: mod_base = OTHER; note = 2'-O-methyluridine-3'-phosphate
  modified_base 19: mod_base = OTHER; note = 2'-O-methyladenosine-3'-phosphate
  modified_base 20: mod_base = OTHER; note = 2'-O-methylguanosine-3'-phosphate
  modified_base 21: mod_base = OTHER; note = 2'-O-methylguanosine-3'-phosphorothioate
  modified_base 22: mod_base = OTHER; note = 2'-O-methyluridine-3'-phosphorothioate
  modified_base 23: mod_base = OTHER; note = 2'-O-methylguanosine
tagtaatacatatctgctaggtg

SEQ ID NO: 275 - RNA, 23 nt, synthetic construct
  source 1..23: mol_type = other RNA
cacctagcagatatgtattactt

SEQ ID NO: 276 - RNA, 21 nt, synthetic construct
  source 1..21: mol_type = other RNA
  modified_base 1: mod_base = OTHER; note = 2'-O-methylcytidine-3'-phosphorothioate
  modified_base 2: mod_base = OTHER; note = 2'-O-methylcytidine-3'-phosphorothioate
  modified_base 3: mod_base = OTHER; note = 2'-O-methylcytidine-3'-phosphate
  modified_base 4: mod_base = OTHER; note = 2'-O-methyluridine-3'-phosphate
  modified_base 5: mod_base = OTHER; note = 2'-O-methylguanosine-3'-phosphate
  modified_base 6: mod_base = OTHER; note = 2'-O-hexadecyl-adenosine-3'-phosphate
  modified_base 7: mod_base = OTHER; note = 2'-deoxy-2'-fluoroadenosine-3'-phosphate
  modified_base 8: mod_base = OTHER; note = 2'-O-methyluridine-3'-phosphate
  modified_base 9: mod_base = OTHER; note = 2'-deoxy-2'-fluorouridine-3'-phosphate
  modified_base 10: mod_base = OTHER; note = 2'-deoxy-2'-fluoroguanosine-3'-phosphate
  modified_base 11: mod_base = OTHER; note = 2'-deoxy-2'-fluorouridine-3'-phosphate
  modified_base 12: mod_base = OTHER; note = 2'-O-methyluridine-3'-phosphate
  modified_base 13: mod_base = OTHER; note = 2'-O-methyluridine-3'-phosphate
  modified_base 14: mod_base = OTHER; note = 2'-O-methylguanosine-3'-phosphate
  modified_base 15: mod_base = OTHER; note = 2'-O-methyladenosine-3'-phosphate
  modified_base 16: mod_base = OTHER; note = 2'-O-methyluridine-3'-phosphate
  modified_base 17: mod_base = OTHER; note = 2'-O-methyladenosine-3'-phosphate
  modified_base 18: mod_base = OTHER; note = 2'-O-methyluridine-3'-phosphate
  modified_base 19: mod_base = OTHER; note = 2'-O-methyluridine-3'-phosphorothioate
  modified_base 20: mod_base = OTHER; note = 2'-O-methylguanosine-3'-phosphorothioate
  modified_base 21: mod_base = OTHER; note = 2'-O-methyladenosine
ccctgaattgtttgatattga

SEQ ID NO: 277 - RNA, 23 nt, synthetic construct
  source 1..23: mol_type = other RNA
  modified_base 1: mod_base = OTHER; note = 2'-O-methyluridine-3'-phosphorothioate 5'-(E)-Vinylphosphonate
  modified_base 2: mod_base = OTHER; note = 2'-deoxy-2'-fluorocytidine-3'-phosphorothioate
  modified_base 3: mod_base = OTHER; note = 2'-O-methyladenosine-3'-phosphate
  modified_base 4: mod_base = OTHER; note = 2'-O-methyladenosine-3'-phosphate
  modified_base 5: mod_base = OTHER; note = 2'-O-methyluridine-3'-phosphate
  modified_base 6: mod_base = OTHER; note = 2'-deoxy-2'-fluoroadenosine-3'-phosphate
  modified_base 7: mod_base = OTHER; note = 2'-O-methyluridine-3'-phosphate
  modified_base 8: mod_base = OTHER; note = 2'-deoxy-2'-fluorocytidine-3'-phosphate
  modified_base 9: mod_base = OTHER; note = 2'-deoxy-2'-fluoroadenosine-3'-phosphate
  modified_base 10: mod_base = OTHER; note = 2'-O-methyladenosine-3'-phosphate
  modified_base 11: mod_base = OTHER; note = 2'-O-methyladenosine-3'-phosphate
  modified_base 12: mod_base = OTHER; note = 2'-O-methylcytidine-3'-phosphate
  modified_base 13: mod_base = OTHER; note = 2'-O-methyladenosine-3'-phosphate
  modified_base 14: mod_base = OTHER; note = 2'-deoxy-2'-fluoroadenosine-3'-phosphate
  modified_base 15: mod_base = OTHER; note = 2'-O-methyluridine-3'-phosphate
  modified_base 16: mod_base = OTHER; note = 2'-deoxy-2'-fluorouridine-3'-phosphate
  modified_base 17: mod_base = OTHER; note = 2'-O-methylcytidine-3'-phosphate
  modified_base 18: mod_base = OTHER; note = 2'-O-methyladenosine-3'-phosphate
  modified_base 19: mod_base = OTHER; note = 2'-O-methylguanosine-3'-phosphate
  modified_base 20: mod_base = OTHER; note = 2'-O-methylguanosine-3'-phosphate
  modified_base 21: mod_base = OTHER; note = 2'-O-methylguanosine-3'-phosphorothioate
  modified_base 22: mod_base = OTHER; note = 2'-O-methyladenosine-3'-phosphorothioate
  modified_base 23: mod_base = OTHER; note = 2'-O-methyladenosine
tcaatatcaaacaattcagggaa

SEQ ID NO: 278 - RNA, 23 nt, synthetic construct
  source 1..23: mol_type = other RNA
ttccctgaattgtttgatattgt

SEQ ID NO: 279 - RNA, 21 nt, synthetic construct
  source 1..21: mol_type = other RNA
  modified_base 1: mod_base = OTHER; note = 2'-O-methylguanosine-3'-phosphorothioate
  modified_base 2: mod_base = OTHER; note = 2'-O-methyladenosine-3'-phosphorothioate
  modified_base 3: mod_base = OTHER; note = 2'-O-methyladenosine-3'-phosphate
  modified_base 4: mod_base = OTHER; note = 2'-O-methyluridine-3'-phosphate
  modified_base 5: mod_base = OTHER; note = 2'-O-methyluridine-3'-phosphate
  modified_base 6: mod_base = OTHER; note = 2'-O-hexadecyl-guanosine-3'-phosphate
  modified_base 7: mod_base = OTHER; note = 2'-deoxy-2'-fluorouridine-3'-phosphate
  modified_base 8: mod_base = OTHER; note = 2'-O-methyluridine-3'-phosphate
  modified_base 9: mod_base = OTHER; note = 2'-deoxy-2'-fluorouridine-3'-phosphate
  modified_base 10: mod_base = OTHER; note = 2'-deoxy-2'-fluoroguanosine-3'-phosphate
  modified_base 11: mod_base = OTHER; note = 2'-deoxy-2'-fluoroadenosine-3'-phosphate
  modified_base 12: mod_base = OTHER; note = 2'-O-methyluridine-3'-phosphate
  modified_base 13: mod_base = OTHER; note = 2'-O-methyladenosine-3'-phosphate
  modified_base 14: mod_base = OTHER; note = 2'-O-methyluridine-3'-phosphate
  modified_base 15: mod_base = OTHER; note = 2'-O-methyluridine-3'-phosphate
  modified_base 16: mod_base = OTHER; note = 2'-O-methylguanosine-3'-phosphate
  modified_base 17: mod_base = OTHER; note = 2'-O-methyluridine-3'-phosphate
  modified_base 18: mod_base = OTHER; note = 2'-O-methylcytidine-3'-phosphate
  modified_base 19: mod_base = OTHER; note = 2'-O-methyladenosine-3'-phosphorothioate
  modified_base 20: mod_base = OTHER; note = 2'-O-methylcytidine-3'-phosphorothioate
  modified_base 21: mod_base = OTHER; note = 2'-O-methyladenosine
gaattgtttgatattgtcaca

SEQ ID NO: 280 - RNA, 23 nt, synthetic construct
  source 1..23: mol_type = other RNA
  modified_base 1: mod_base = OTHER; note = 2'-O-methyluridine-3'-phosphorothioate 5'-(E)-Vinylphosphonate
  modified_base 2: mod_base = OTHER; note = 2'-deoxy-2'-fluoroguanosine-3'-phosphorothioate
  modified_base 3: mod_base = OTHER; note = 2'-O-methyluridine-3'-phosphate
  modified_base 4: mod_base = OTHER; note = 2'-O-methylguanosine-3'-phosphate
  modified_base 5: mod_base = OTHER; note = 2'-O-methyladenosine-3'-phosphate
  modified_base 6: mod_base = OTHER; note = 2'-deoxy-2'-fluorocytidine-3'-phosphate
  modified_base 7: mod_base = OTHER; note = 2'-O-methyladenosine-3'-phosphate
  modified_base 8: mod_base = OTHER; note = 2'-deoxy-2'-fluoroadenosine-3'-phosphate
  modified_base 9: mod_base = OTHER; note = 2'-deoxy-2'-fluorouridine-3'-phosphate
  modified_base 10: mod_base = OTHER; note = 2'-O-methyladenosine-3'-phosphate
  modified_base 11: mod_base = OTHER; note = 2'-O-methyluridine-3'-phosphate
  modified_base 12: mod_base = OTHER; note = 2'-O-methylcytidine-3'-phosphate
  modified_base 13: mod_base = OTHER; note = 2'-O-methyladenosine-3'-phosphate
  modified_base 14: mod_base = OTHER; note = 2'-deoxy-2'-fluoroadenosine-3'-phosphate
  modified_base 15: mod_base = OTHER; note = 2'-O-methyladenosine-3'-phosphate
  modified_base 16: mod_base = OTHER; note = 2'-deoxy-2'-fluorocytidine-3'-phosphate
  modified_base 17: mod_base = OTHER; note = 2'-O-methyladenosine-3'-phosphate
  modified_base 18: mod_base = OTHER; note = 2'-O-methyladenosine-3'-phosphate
  modified_base 19: mod_base = OTHER; note = 2'-O-methyluridine-3'-phosphate
  modified_base 20: mod_base = OTHER; note = 2'-O-methyluridine-3'-phosphate
  modified_base 21: mod_base = OTHER; note = 2'-O-methylcytidine-3'-phosphorothioate
  modified_base 22: mod_base = OTHER; note = 2'-O-methyladenosine-3'-phosphorothioate
  modified_base 23: mod_base = OTHER; note = 2'-O-methylguanosine
tgtgacaatatcaaacaattcag

SEQ ID NO: 281 - RNA, 23 nt, synthetic construct
  source 1..23: mol_type = other RNA
ctgaattgtttgatattgtcacc

SEQ ID NO: 282 - RNA, 21 nt, synthetic construct
  source 1..21: mol_type = other RNA
  modified_base 1: mod_base = OTHER; note = 2'-O-methylguanosine-3'-phosphorothioate
  modified_base 2: mod_base = OTHER; note = 2'-O-methylguanosine-3'-phosphorothioate
  modified_base 3: mod_base = OTHER; note = 2'-O-methyladenosine-3'-phosphate
  modified_base 4: mod_base = OTHER; note = 2'-O-methylguanosine-3'-phosphate
  modified_base 5: mod_base = OTHER; note = 2'-O-methyladenosine-3'-phosphate
  modified_base 6: mod_base = OTHER; note = 2'-O-hexadecyl-uridine-3'-phosphate
  modified_base 7: mod_base = OTHER; note = 2'-deoxy-2'-fluoroguanosine-3'-phosphate
  modified_base 8: mod_base = OTHER; note = 2'-O-methyladenosine-3'-phosphate
  modified_base 9: mod_base = OTHER; note = 2'-deoxy-2'-fluorocytidine-3'-phosphate
  modified_base 10: mod_base = OTHER; note = 2'-deoxy-2'-fluoroadenosine-3'-phosphate
  modified_base 11: mod_base = OTHER; note = 2'-deoxy-2'-fluoroguanosine-3'-phosphate
  modified_base 12: mod_base = OTHER; note = 2'-O-methyladenosine-3'-phosphate
  modified_base 13: mod_base = OTHER; note = 2'-O-methyladenosine-3'-phosphate
  modified_base 14: mod_base = OTHER; note = 2'-O-methyladenosine-3'-phosphate
  modified_base 15: mod_base = OTHER; note = 2'-O-methyluridine-3'-phosphate
  modified_base 16: mod_base = OTHER; note = 2'-O-methyladenosine-3'-phosphate
  modified_base 17: mod_base = OTHER; note = 2'-O-methyluridine-3'-phosphate
  modified_base 18: mod_base = OTHER; note = 2'-O-methylguanosine-3'-phosphate
  modified_base 19: mod_base = OTHER; note = 2'-O-methyladenosine-3'-phosphorothioate
  modified_base 20: mod_base = OTHER; note = 2'-O-methyluridine-3'-phosphorothioate
  modified_base 21: mod_base = OTHER; note = 2'-O-methyladenosine
ggagatgacagaaatatgata

SEQ ID NO: 283 - RNA, 23 nt, synthetic construct
  source 1..23: mol_type = other RNA
  modified_base 1: mod_base = OTHER; note = 2'-O-methyluridine-3'-phosphorothioate 5'-(E)-Vinylphosphonate
  modified_base 2: mod_base = OTHER; note = 2'-deoxy-2'-fluoroadenosine-3'-phosphorothioate
  modified_base 3: mod_base = OTHER; note = 2'-O-methyluridine-3'-phosphate
  modified_base 4: mod_base = OTHER; note = 2'-O-methylcytidine-3'-phosphate
  modified_base 5: mod_base = OTHER; note = 2'-O-methyladenosine-3'-phosphate
  modified_base 6: mod_base = OTHER; note = 2'-deoxy-2'-fluorouridine-3'-phosphate
  modified_base 7: mod_base = OTHER; note = 2'-O-methyladenosine-3'-phosphate
  modified_base 8: mod_base = OTHER; note = 2'-deoxy-2'-fluorouridine-3'-phosphate
  modified_base 9: mod_base = OTHER; note = 2'-deoxy-2'-fluorouridine-3'-phosphate
  modified_base 10: mod_base = OTHER; note = 2'-O-methyluridine-3'-phosphate
  modified_base 11: mod_base = OTHER; note = 2'-O-methylcytidine-3'-phosphate
  modified_base 12: mod_base = OTHER; note = 2'-O-methyluridine-3'-phosphate
  modified_base 13: mod_base = OTHER; note = 2'-O-methylguanosine-3'-phosphate
  modified_base 14: mod_base = OTHER; note = 2'-deoxy-2'-fluorouridine-3'-phosphate
  modified_base 15: mod_base = OTHER; note = 2'-O-methylcytidine-3'-phosphate
  modified_base 16: mod_base = OTHER; note = 2'-deoxy-2'-fluoroadenosine-3'-phosphate
  modified_base 17: mod_base = OTHER; note = 2'-O-methyluridine-3'-phosphate
  modified_base 18: mod_base = OTHER; note = 2'-O-methylcytidine-3'-phosphate
  modified_base 19: mod_base = OTHER; note = 2'-O-methyluridine-3'-phosphate
  modified_base 20: mod_base = OTHER; note = 2'-O-methylcytidine-3'-phosphate
  modified_base 21: mod_base = OTHER; note = 2'-O-methylcytidine-3'-phosphorothioate
  modified_base 22: mod_base = OTHER; note = 2'-O-methyladenosine-3'-phosphorothioate
  modified_base 23: mod_base = OTHER; note = 2'-O-methyladenosine
tatcatatttctgtcatctccaa

SEQ ID NO: 284 - RNA, 23 nt, synthetic construct
  source 1..23: mol_type = other RNA
ttggagatgacagaaatatgatt

SEQ ID NO: 285 - RNA, 21 nt, synthetic construct
  source 1..21: mol_type = other RNA
  modified_base 1: mod_base = OTHER; note = 2'-O-methyluridine-3'-phosphorothioate
  modified_base 2: mod_base = OTHER; note = 2'-O-methyluridine-3'-phosphorothioate
  modified_base 3: mod_base = OTHER; note = 2'-O-methyladenosine-3'-phosphate
  modified_base 4: mod_base = OTHER; note = 2'-O-methylguanosine-3'-phosphate
  modified_base 5: mod_base = OTHER; note = 2'-O-methylguanosine-3'-phosphate
  modified_base 6: mod_base = OTHER; note = 2'-O-hexadecyl-adenosine-3'-phosphate
  modified_base 7: mod_base = OTHER; note = 2'-deoxy-2'-fluoroguanosine-3'-phosphate
  modified_base 8: mod_base = OTHER; note = 2'-O-methyluridine-3'-phosphate
  modified_base 9: mod_base = OTHER; note = 2'-deoxy-2'-fluorouridine-3'-phosphate
  modified_base 10: mod_base = OTHER; note = 2'-deoxy-2'-fluorouridine-3'-phosphate
  modified_base 11: mod_base = OTHER; note = 2'-deoxy-2'-fluorouridine-3'-phosphate
  modified_base 12: mod_base = OTHER; note = 2'-O-methylguanosine-3'-phosphate
  modified_base 13: mod_base = OTHER; note = 2'-O-methyluridine-3'-phosphate
  modified_base 14: mod_base = OTHER; note = 2'-O-methyluridine-3'-phosphate
  modified_base 15: mod_base = OTHER; note = 2'-O-methyluridine-3'-phosphate
  modified_base 16: mod_base = OTHER; note = 2'-O-methyladenosine-3'-phosphate
  modified_base 17: mod_base = OTHER; note = 2'-O-methylguanosine-3'-phosphate
  modified_base 18: mod_base = OTHER; note = 2'-O-methyladenosine-3'-phosphate
  modified_base 19: mod_base = OTHER; note = 2'-O-methylguanosine-3'-phosphorothioate
  modified_base 20: mod_base = OTHER; note = 2'-O-methylcytidine-3'-phosphorothioate
  modified_base 21: mod_base = OTHER; note = 2'-O-methyladenosine
ttaggagttttgtttagagca

SEQ ID NO: 286 - RNA, 23 nt, synthetic construct
  source 1..23: mol_type = other RNA
  modified_base 1: mod_base = OTHER; note = 2'-O-methyluridine-3'-phosphorothioate 5'-(E)-Vinylphosphonate
  modified_base 2: mod_base = OTHER; note = 2'-deoxy-2'-fluoroguanosine-3'-phosphorothioate
  modified_base 3: mod_base = OTHER; note = 2'-O-methylcytidine-3'-phosphate
  modified_base 4: mod_base = OTHER; note = 2'-O-methyluridine-3'-phosphate
  modified_base 5: mod_base = OTHER; note = 2'-O-methylcytidine-3'-phosphate
  modified_base 6: mod_base = OTHER; note = 2'-deoxy-2'-fluorouridine-3'-phosphate
  modified_base 7: mod_base = OTHER; note = 2'-O-methyladenosine-3'-phosphate
  modified_base 8: mod_base = OTHER; note = 2'-deoxy-2'-fluoroadenosine-3'-phosphate
  modified_base 9: mod_base = OTHER; note = 2'-deoxy-2'-fluoroadenosine-3'-phosphate
  modified_base 10: mod_base = OTHER; note = 2'-O-methylcytidine-3'-phosphate
  modified_base 11: mod_base = OTHER; note = 2'-O-methyladenosine-3'-phosphate
  modified_base 12: mod_base = OTHER; note = 2'-O-methyladenosine-3'-phosphate
  modified_base 13: mod_base = OTHER; note = 2'-O-methyladenosine-3'-phosphate
  modified_base 14: mod_base = OTHER; note = 2'-deoxy-2'-fluoroadenosine-3'-phosphate
  modified_base 15: mod_base = OTHER; note = 2'-O-methylcytidine-3'-phosphate
  modified_base 16: mod_base = OTHER; note = 2'-deoxy-2'-fluorouridine-3'-phosphate
  modified_base 17: mod_base = OTHER; note = 2'-O-methylcytidine-3'-phosphate
  modified_base 18: mod_base = OTHER; note = 2'-O-methylcytidine-3'-phosphate
  modified_base 19: mod_base = OTHER; note = 2'-O-methyluridine-3'-phosphate
  modified_base 20: mod_base = OTHER; note = 2'-O-methyladenosine-3'-phosphate
  modified_base 21: mod_base = OTHER; note = 2'-O-methyladenosine-3'-phosphorothioate
  modified_base 22: mod_base = OTHER; note = 2'-O-methylguanosine-3'-phosphorothioate
  modified_base 23: mod_base = OTHER; note = 2'-O-methyluridine
tgctctaaacaaaactcctaagt

SEQ ID NO: 287 - RNA, 23 nt, synthetic construct
  source 1..23: mol_type = other RNA
acttaggagttttgtttagagca

SEQ ID NO: 288 - RNA, 21 nt, synthetic construct
  source 1..21: mol_type = other RNA
  modified_base 1: mod_base = OTHER; note = 2'-O-methylguanosine-3'-phosphorothioate
  modified_base 2: mod_base = OTHER; note = 2'-O-methyluridine-3'-phosphorothioate
  modified_base 3: mod_base = OTHER; note = 2'-O-methylguanosine-3'-phosphate
  modified_base 4: mod_base = OTHER; note = 2'-O-methyluridine-3'-phosphate
  modified_base 5: mod_base = OTHER; note = 2'-O-methylcytidine-3'-phosphate
  modified_base 6: mod_base = OTHER; note = 2'-O-hexadecyl-uridine-3'-phosphate
  modified_base 7: mod_base = OTHER; note = 2'-deoxy-2'-fluoroadenosine-3'-phosphate
  modified_base 8: mod_base = OTHER; note = 2'-O-methyladenosine-3'-phosphate
  modified_base 9: mod_base = OTHER; note = 2'-deoxy-2'-fluorouridine-3'-phosphate
  modified_base 10: mod_base = OTHER; note = 2'-deoxy-2'-fluoroguanosine-3'-phosphate
  modified_base 11: mod_base = OTHER; note = 2'-deoxy-2'-fluorocytidine-3'-phosphate
  modified_base 12: mod_base = OTHER; note = 2'-O-methyladenosine-3'-phosphate
  modified_base 13: mod_base = OTHER; note = 2'-O-methyluridine-3'-phosphate
  modified_base 14: mod_base = OTHER; note = 2'-O-methyluridine-3'-phosphate
  modified_base 15: mod_base = OTHER; note = 2'-O-methyladenosine-3'-phosphate
  modified_base 16: mod_base = OTHER; note = 2'-O-methyladenosine-3'-phosphate
  modified_base 17: mod_base = OTHER; note = 2'-O-methylcytidine-3'-phosphate
  modified_base 18: mod_base = OTHER; note = 2'-O-methyluridine-3'-phosphate
  modified_base 19: mod_base = OTHER; note = 2'-O-methyluridine-3'-phosphorothioate
  modified_base 20: mod_base = OTHER; note = 2'-O-methyluridine-3'-phosphorothioate
  modified_base 21: mod_base = OTHER; note = 2'-O-methyladenosine
gtgtctaatgcattaacttta

SEQ ID NO: 289 - RNA, 23 nt, synthetic construct
  source 1..23: mol_type = other RNA
  modified_base 1: mod_base = OTHER; note = 2'-O-methyluridine-3'-phosphorothioate 5'-(E)-Vinylphosphonate
  modified_base 2: mod_base = OTHER; note = 2'-deoxy-2'-fluoroadenosine-3'-phosphorothioate
  modified_base 3: mod_base = OTHER; note = 2'-O-methyladenosine-3'-phosphate
  modified_base 4: mod_base = OTHER; note = 2'-O-methyladenosine-3'-phosphate
  modified_base 5: mod_base = OTHER; note = 2'-O-methylguanosine-3'-phosphate
  modified_base 6: mod_base = OTHER; note = 2'-deoxy-2'-fluorouridine-3'-phosphate
  modified_base 7: mod_base = OTHER; note = 2'-O-methyluridine-3'-phosphate
  modified_base 8: mod_base = OTHER; note = 2'-deoxy-2'-fluoroadenosine-3'-phosphate
  modified_base 9: mod_base = OTHER; note = 2'-deoxy-2'-fluoroadenosine-3'-phosphate
  modified_base 10: mod_base = OTHER; note = 2'-O-methyluridine-3'-phosphate
  modified_base 11: mod_base = OTHER; note = 2'-O-methylguanosine-3'-phosphate
  modified_base 12: mod_base = OTHER; note = 2'-O-methylcytidine-3'-phosphate
  modified_base 13: mod_base = OTHER; note = 2'-O-methyladenosine-3'-phosphate
  modified_base 14: mod_base = OTHER; note = 2'-deoxy-2'-fluorouridine-3'-phosphate
  modified_base 15: mod_base = OTHER; note = 2'-O-methyluridine-3'-phosphate
  modified_base 16: mod_base = OTHER; note = 2'-deoxy-2'-fluoroadenosine-3'-phosphate
  modified_base 17: mod_base = OTHER; note = 2'-O-methylguanosine-3'-phosphate
  modified_base 18: mod_base = OTHER; note = 2'-O-methyladenosine-3'-phosphate
  modified_base 19: mod_base = OTHER; note = 2'-O-methylcytidine-3'-phosphate
  modified_base 20: mod_base = OTHER; note = 2'-O-methyladenosine-3'-phosphate
  modified_base 21: mod_base = OTHER; note = 2'-O-methylcytidine-3'-phosphorothioate
  modified_base 22: mod_base = OTHER; note = 2'-O-methyluridine-3'-phosphorothioate
  modified_base 23: mod_base = OTHER; note = 2'-O-methyluridine
taaagttaatgcattagacactt

SEQ ID NO: 290 - RNA, 23 nt, synthetic construct
  source 1..23: mol_type = other RNA
aagtgtctaatgcattaactttt

SEQ ID NO: 291 - RNA, 21 nt, synthetic construct
  source 1..21: mol_type = other RNA
  modified_base 1: mod_base = OTHER; note = 2'-O-methyluridine-3'-phosphorothioate
  modified_base 2: mod_base = OTHER; note = 2'-O-methylcytidine-3'-phosphorothioate
  modified_base 3: mod_base = OTHER; note = 2'-O-methyladenosine-3'-phosphate
  modified_base 4: mod_base = OTHER; note = 2'-O-methylcytidine-3'-phosphate
  modified_base 5: mod_base = OTHER; note = 2'-O-methylcytidine-3'-phosphate
  modified_base 6: mod_base = OTHER; note = 2'-O-hexadecyl-uridine-3'-phosphate
  modified_base 7: mod_base = OTHER; note = 2'-deoxy-2'-fluoroadenosine-3'-phosphate
  modified_base 8: mod_base = OTHER; note = 2'-O-methylguanosine-3'-phosphate
  modified_base 9: mod_base = OTHER; note = 2'-deoxy-2'-fluorocytidine-3'-phosphate
  modified_base 10: mod_base = OTHER; note = 2'-deoxy-2'-fluoroadenosine-3'-phosphate
  modified_base 11: mod_base = OTHER; note = 2'-deoxy-2'-fluoroguanosine-3'-phosphate
  modified_base 12: mod_base = OTHER; note = 2'-O-methyladenosine-3'-phosphate
  modified_base 13: mod_base = OTHER; note = 2'-O-methyluridine-3'-phosphate
  modified_base 14: mod_base = OTHER; note = 2'-O-methyladenosine-3'-phosphate
  modified_base 15: mod_base = OTHER; note = 2'-O-methyluridine-3'-phosphate
  modified_base 16: mod_base = OTHER; note = 2'-O-methylguanosine-3'-phosphate
  modified_base 17: mod_base = OTHER; note = 2'-O-methyluridine-3'-phosphate
  modified_base 18: mod_base = OTHER; note = 2'-O-methyladenosine-3'-phosphate
  modified_base 19: mod_base = OTHER; note = 2'-O-methyluridine-3'-phosphorothioate
  modified_base 20: mod_base = OTHER; note = 2'-O-methyluridine-3'-phosphorothioate
  modified_base 21: mod_base = OTHER; note = 2'-O-methyladenosine
tcacctagcagatatgtatta

SEQ ID NO: 292 - RNA, 23 nt, synthetic construct
  source 1..23: mol_type = other RNA
  modified_base 1: mod_base = OTHER; note = 2'-O-methyluridine-3'-phosphorothioate 5'-(E)-Vinylphosphonate
  modified_base 2: mod_base = OTHER; note = 2'-deoxy-2'-fluoroadenosine-3'-phosphorothioate
  modified_base 3: mod_base = OTHER; note = 2'-O-methyladenosine-3'-phosphate
  modified_base 4: mod_base = OTHER; note = 2'-O-methyluridine-3'-phosphate
  modified_base 5: mod_base = OTHER; note = 2'-O-methyladenosine-3'-phosphate
  modified_base 6: mod_base = OTHER; note = 2'-deoxy-2'-fluorocytidine-3'-phosphate
  modified_base 7: mod_base = OTHER; note = 2'-O-methyladenosine-3'-phosphate
  modified_base 8: mod_base = OTHER; note = 2'-deoxy-2'-fluorouridine-3'-phosphate
  modified_base 9: mod_base = OTHER; note = 2'-deoxy-2'-fluoroadenosine-3'-phosphate
  modified_base 10: mod_base = OTHER; note = 2'-O-methyluridine-3'-phosphate
  modified_base 11: mod_base = OTHER; note = 2'-O-methylcytidine-3'-phosphate
  modified_base 12: mod_base = OTHER; note = 2'-O-methyluridine-3'-phosphate
  modified_base 13: mod_base = OTHER; note = 2'-O-methylguanosine-3'-phosphate
  modified_base 14: mod_base = OTHER; note = 2'-deoxy-2'-fluorocytidine-3'-phosphate
  modified_base 15: mod_base = OTHER; note = 2'-O-methyluridine-3'-phosphate
  modified_base 16: mod_base = OTHER; note = 2'-deoxy-2'-fluoroadenosine-3'-phosphate
  modified_base 17: mod_base = OTHER; note = 2'-O-methylguanosine-3'-phosphate
  modified_base 18: mod_base = OTHER; note = 2'-O-methylguanosine-3'-phosphate
  modified_base 19: mod_base = OTHER; note = 2'-O-methyluridine-3'-phosphate
  modified_base 20: mod_base = OTHER; note = 2'-O-methylguanosine-3'-phosphate
  modified_base 21: mod_base = OTHER; note = 2'-O-methyladenosine-3'-phosphorothioate
  modified_base 22: mod_base = OTHER; note = 2'-O-methylcytidine-3'-phosphorothioate
  modified_base 23: mod_base = OTHER; note = 2'-O-methyladenosine
taatacatatctgctaggtgaca

SEQ ID NO: 293 - RNA, 23 nt, synthetic construct
  source 1..23: mol_type = other RNA
tgtcacctagcagatatgtatta

SEQ ID NO: 294 - RNA, 21 nt, synthetic construct
  source 1..21: mol_type = other RNA
  modified_base 1: mod_base = OTHER; note = 2'-O-methylcytidine-3'-phosphorothioate
  modified_base 2: mod_base = OTHER; note = 2'-O-methyladenosine-3'-phosphorothioate
  modified_base 3: mod_base = OTHER; note = 2'-O-methyluridine-3'-phosphate
  modified_base 4: mod_base = OTHER; note = 2'-O-methyladenosine-3'-phosphate
  modified_base 5: mod_base = OTHER; note = 2'-O-methylguanosine-3'-phosphate
  modified_base 6: mod_base = OTHER; note = 2'-O-hexadecyl-uridine-3'-phosphate
  modified_base 7: mod_base = OTHER; note = 2'-deoxy-2'-fluorouridine-3'-phosphate
  modified_base 8: mod_base = OTHER; note = 2'-O-methyluridine-3'-phosphate
  modified_base 9: mod_base = OTHER; note = 2'-deoxy-2'-fluorocytidine-3'-phosphate
  modified_base 10: mod_base = OTHER; note = 2'-deoxy-2'-fluorouridine-3'-phosphate
  modified_base 11: mod_base = OTHER; note = 2'-deoxy-2'-fluoroguanosine-3'-phosphate
  modified_base 12: mod_base = OTHER; note = 2'-O-methyluridine-3'-phosphate
  modified_base 13: mod_base = OTHER; note = 2'-O-methyladenosine-3'-phosphate
  modified_base 14: mod_base = OTHER; note = 2'-O-methyladenosine-3'-phosphate
  modified_base 15: mod_base = OTHER; note = 2'-O-methyluridine-3'-phosphate
  modified_base 16: mod_base = OTHER; note = 2'-O-methyluridine-3'-phosphate
  modified_base 17: mod_base = OTHER; note = 2'-O-methylguanosine-3'-phosphate
  modified_base 18: mod_base = OTHER; note = 2'-O-methylguanosine-3'-phosphate
  modified_base 19: mod_base = OTHER; note = 2'-O-methylcytidine-3'-phosphorothioate
  modified_base 20: mod_base = OTHER; note = 2'-O-methyluridine-3'-phosphorothioate
  modified_base 21: mod_base = OTHER; note = 2'-O-methyladenosine
catagtttctgtaattggcta

SEQ ID NO: 295 - RNA, 23 nt, synthetic construct
  source 1..23: mol_type = other RNA
  modified_base 1: mod_base = OTHER; note = 2'-O-methyluridine-3'-phosphorothioate 5'-(E)-Vinylphosphonate
  modified_base 2: mod_base = OTHER; note = 2'-deoxy-2'-fluoroadenosine-3'-phosphorothioate
  modified_base 3: mod_base = OTHER; note = 2'-O-methylguanosine-3'-phosphate
  modified_base 4: mod_base = OTHER; note = 2'-O-methylcytidine-3'-phosphate
  modified_base 5: mod_base = OTHER; note = 2'-O-methylcytidine-3'-phosphate
  modified_base 6: mod_base = OTHER; note = 2'-deoxy-2'-fluoroadenosine-3'-phosphate
  modified_base 7: mod_base = OTHER; note = 2'-O-methyladenosine-3'-phosphate
  modified_base 8: mod_base = OTHER; note = 2'-deoxy-2'-fluorouridine-3'-phosphate
  modified_base 9: mod_base = OTHER; note = 2'-deoxy-2'-fluorouridine-3'-phosphate
  modified_base 10: mod_base = OTHER; note = 2'-O-methyladenosine-3'-phosphate
  modified_base 11: mod_base = OTHER; note = 2'-O-methylcytidine-3'-phosphate
  modified_base 12: mod_base = OTHER; note = 2'-O-methyladenosine-3'-phosphate
  modified_base 13: mod_base = OTHER; note = 2'-O-methylguanosine-3'-phosphate
  modified_base 14: mod_base = OTHER; note = 2'-deoxy-2'-fluoroadenosine-3'-phosphate
  modified_base 15: mod_base = OTHER; note = 2'-O-methyladenosine-3'-phosphate
  modified_base 16: mod_base = OTHER; note = 2'-deoxy-2'-fluoroadenosine-3'-phosphate
  modified_base 17: mod_base = OTHER; note = 2'-O-methylcytidine-3'-phosphate
  modified_base 18: mod_base = OTHER; note = 2'-O-methyluridine-3'-phosphate
  modified_base 19: mod_base = OTHER; note = 2'-O-methyladenosine-3'-phosphate
  modified_base 20: mod_base = OTHER; note = 2'-O-methyluridine-3'-phosphate
  modified_base 21: mod_base = OTHER; note = 2'-O-methylguanosine-3'-phosphorothioate
  modified_base 22: mod_base = OTHER; note = 2'-O-methyladenosine-3'-phosphorothioate
  modified_base 23: mod_base = OTHER; note = 2'-O-methyladenosine
tagccaattacagaaactatgaa

SEQ ID NO: 296 - RNA, 23 nt, synthetic construct
  source 1..23: mol_type = other RNA
ttcatagtttctgtaattggctt

SEQ ID NO: 297 - RNA, 21 nt, synthetic construct
  source 1..21: mol_type = other RNA
  modified_base 1: mod_base = OTHER; note = 2'-O-methyladenosine-3'-phosphorothioate
  modified_base 2: mod_base = OTHER; note = 2'-O-methyluridine-3'-phosphorothioate
  modified_base 3: mod_base = OTHER; note = 2'-O-methyluridine-3'-phosphate
  modified_base 4: mod_base = OTHER; note = 2'-O-methyluridine-3'-phosphate
  modified_base 5: mod_base = OTHER; note = 2'-O-methylcytidine-3'-phosphate
  modified_base 6: mod_base = OTHER; note = 2'-O-hexadecyl-uridine-3'-phosphate
  modified_base 7: mod_base = OTHER; note = 2'-deoxy-2'-fluoroguanosine-3'-phosphate
  modified_base 8: mod_base = OTHER; note = 2'-O-methyluridine-3'-phosphate
  modified_base 9: mod_base = OTHER; note = 2'-deoxy-2'-fluorocytidine-3'-phosphate
  modified_base 10: mod_base = OTHER; note = 2'-deoxy-2'-fluorouridine-3'-phosphate
  modified_base 11: mod_base = OTHER; note = 2'-deoxy-2'-fluorocytidine-3'-phosphate
  modified_base 12: mod_base = OTHER; note = 2'-O-methyladenosine-3'-phosphate
  modified_base 13: mod_base = OTHER; note = 2'-O-methyluridine-3'-phosphate
  modified_base 14: mod_base = OTHER; note = 2'-O-methyladenosine-3'-phosphate
  modified_base 15: mod_base = OTHER; note = 2'-O-methyladenosine-3'-phosphate
  modified_base 16: mod_base = OTHER; note = 2'-O-methyluridine-3'-phosphate
  modified_base 17: mod_base = OTHER; note = 2'-O-methyluridine-3'-phosphate
  modified_base 18: mod_base = OTHER; note = 2'-O-methylguanosine-3'-phosphate
  modified_base 19: mod_base = OTHER; note = 2'-O-methyluridine-3'-phosphorothioate
  modified_base 20: mod_base = OTHER; note = 2'-O-methylcytidine-3'-phosphorothioate
  modified_base 21: mod_base = OTHER; note = 2'-O-methyladenosine
atttctgtctcataattgtca

SEQ ID NO: 298 - RNA, 23 nt, synthetic construct
  source 1..23: mol_type = other RNA
  modified_base 1: mod_base = OTHER; note = 2'-O-methyluridine-3'-phosphorothioate 5'-(E)-Vinylphosphonate
  modified_base 2: mod_base = OTHER; note = 2'-deoxy-2'-fluoroguanosine-3'-phosphorothioate
  modified_base 3: mod_base = OTHER; note = 2'-O-methyladenosine-3'-phosphate
  modified_base 4: mod_base = OTHER; note = 2'-O-methylcytidine-3'-phosphate
  modified_base 5: mod_base = OTHER; note = 2'-O-methyladenosine-3'-phosphate
  modified_base 6: mod_base = OTHER; note = 2'-deoxy-2'-fluoroadenosine-3'-phosphate
  modified_base 7: mod_base = OTHER; note = 2'-O-methyluridine-3'-phosphate
  modified_base 8: mod_base = OTHER; note = 2'-deoxy-2'-fluorouridine-3'-phosphate
  modified_base 9: mod_base = OTHER; note = 2'-deoxy-2'-fluoroadenosine-3'-phosphate
  modified_base 10: mod_base = OTHER; note = 2'-O-methyluridine-3'-phosphate
  modified_base 11: mod_base = OTHER; note = 2'-O-methylguanosine-3'-phosphate
  modified_base 12: mod_base = OTHER; note = 2'-O-methyladenosine-3'-phosphate
  modified_base 13: mod_base = OTHER; note = 2'-O-methylguanosine-3'-phosphate
  modified_base 14: mod_base = OTHER; note = 2'-deoxy-2'-fluoroadenosine-3'-phosphate
  modified_base 15: mod_base = OTHER; note = 2'-O-methylcytidine-3'-phosphate
  modified_base 16: mod_base = OTHER; note = 2'-deoxy-2'-fluoroadenosine-3'-phosphate
  modified_base 17: mod_base = OTHER; note = 2'-O-methylguanosine-3'-phosphate
  modified_base 18: mod_base = OTHER; note = 2'-O-methyladenosine-3'-phosphate
  modified_base 19: mod_base = OTHER; note = 2'-O-methyladenosine-3'-phosphate
  modified_base 20: mod_base = OTHER; note = 2'-O-methyladenosine-3'-phosphate
  modified_base 21: mod_base = OTHER; note = 2'-O-methyluridine-3'-phosphorothioate
  modified_base 22: mod_base = OTHER; note = 2'-O-methyladenosine-3'-phosphorothioate
  modified_base 23: mod_base = OTHER; note = 2'-O-methyladenosine
tgacaattatgagacagaaataa

SEQ ID NO: 299 - RNA, 23 nt, synthetic construct
  source 1..23: mol_type = other RNA
ttatttctgtctcataattgtca

SEQ ID NO: 300 - RNA, 21 nt, synthetic construct
  source 1..21: mol_type = other RNA
  modified_base 1: mod_base = OTHER; note = 2'-O-methylcytidine-3'-phosphorothioate
  modified_base 2: mod_base = OTHER; note = 2'-O-methyladenosine-3'-phosphorothioate
  modified_base 3: mod_base = OTHER; note = 2'-O-methylguanosine-3'-phosphate
  modified_base 4: mod_base = OTHER; note = 2'-O-methyladenosine-3'-phosphate
  modified_base 5: mod_base = OTHER; note = 2'-O-methylcytidine-3'-phosphate
  modified_base 6: mod_base = OTHER; note = 2'-O-hexadecyl-uridine-3'-phosphate
  modified_base 7: mod_base = OTHER; note = 2'-deoxy-2'-fluorouridine-3'-phosphate
  modified_base 8: mod_base = OTHER; note = 2'-O-methyladenosine-3'-phosphate
  modified_base 9: mod_base = OTHER; note = 2'-deoxy-2'-fluoroguanosine-3'-phosphate
  modified_base 10: mod_base = OTHER; note = 2'-deoxy-2'-fluoroguanosine-3'-phosphate
  modified_base 11: mod_base = OTHER; note = 2'-deoxy-2'-fluoroadenosine-3'-phosphate
  modified_base 12: mod_base = OTHER; note = 2'-O-methylguanosine-3'-phosphate
  modified_base 13: mod_base = OTHER; note = 2'-O-methyluridine-3'-phosphate
  modified_base 14: mod_base = OTHER; note = 2'-O-methyluridine-3'-phosphate
  modified_base 15: mod_base = OTHER; note = 2'-O-methyluridine-3'-phosphate
  modified_base 16: mod_base = OTHER; note = 2'-O-methyluridine-3'-phosphate
  modified_base 17: mod_base = OTHER; note = 2'-O-methylguanosine-3'-phosphate
  modified_base 18: mod_base = OTHER; note = 2'-O-methyluridine-3'-phosphate
  modified_base 19: mod_base = OTHER; note = 2'-O-methyluridine-3'-phosphorothioate
  modified_base 20: mod_base = OTHER; note = 2'-O-methyluridine-3'-phosphorothioate
  modified_base 21: mod_base = OTHER; note = 2'-O-methyladenosine
cagacttaggagttttgttta

SEQ ID NO: 301 - RNA, 23 nt, synthetic construct
  source 1..23: mol_type = other RNA
  modified_base 1: mod_base = OTHER; note = 2'-O-methyluridine-3'-phosphorothioate 5'-(E)-Vinylphosphonate
  modified_base 2: mod_base = OTHER; note = 2'-deoxy-2'-fluoroadenosine-3'-phosphorothioate
  modified_base 3: mod_base = OTHER; note = 2'-O-methyladenosine-3'-phosphate
  modified_base 4: mod_base = OTHER; note = 2'-O-methyladenosine-3'-phosphate
  modified_base 5: mod_base = OTHER; note = 2'-O-methylcytidine-3'-phosphate
  modified_base 6: mod_base = OTHER; note = 2'-deoxy-2'-fluoroadenosine-3'-phosphate
  modified_base 7: mod_base = OTHER; note = 2'-O-methyladenosine-3'-phosphate
  modified_base 8: mod_base = OTHER; note = 2'-deoxy-2'-fluoroadenosine-3'-phosphate
  modified_base 9: mod_base = OTHER; note = 2'-deoxy-2'-fluoroadenosine-3'-phosphate
  modified_base 10: mod_base = OTHER; note = 2'-O-methylcytidine-3'-phosphate
  modified_base 11: mod_base = OTHER; note = 2'-O-methyluridine-3'-phosphate
  modified_base 12: mod_base = OTHER; note = 2'-O-methylcytidine-3'-phosphate
  modified_base 13: mod_base = OTHER; note = 2'-O-methylcytidine-3'-phosphate
  modified_base 14: mod_base = OTHER; note = 2'-deoxy-2'-fluorouridine-3'-phosphate
  modified_base 15: mod_base = OTHER; note = 2'-O-methyladenosine-3'-phosphate
  modified_base 16: mod_base = OTHER; note = 2'-deoxy-2'-fluoroadenosine-3'-phosphate
  modified_base 17: mod_base = OTHER; note = 2'-O-methylguanosine-3'-phosphate
  modified_base 18: mod_base = OTHER; note = 2'-O-methyluridine-3'-phosphate
  modified_base 19: mod_base = OTHER; note = 2'-O-methylcytidine-3'-phosphate
  modified_base 20: mod_base = OTHER; note = 2'-O-methyluridine-3'-phosphate
  modified_base 21: mod_base = OTHER; note = 2'-O-methylguanosine-3'-phosphorothioate
  modified_base 22: mod_base = OTHER; note = 2'-O-methyluridine-3'-phosphorothioate
  modified_base 23: mod_base = OTHER; note = 2'-O-methylcytidine
taaacaaaactcctaagtctgtc

SEQ ID NO: 302 - RNA, 23 nt, synthetic construct
  source 1..23: mol_type = other RNA
gacagacttaggagttttgttta

SEQ ID NO: 303 - RNA, 21 nt, synthetic construct
  source 1..21: mol_type = other RNA
  modified_base 1: mod_base = OTHER; note = 2'-O-methyluridine-3'-phosphorothioate
  modified_base 2: mod_base = OTHER; note = 2'-O-methylcytidine-3'-phosphorothioate
  modified_base 3: mod_base = OTHER; note = 2'-O-methyladenosine-3'-phosphate
  modified_base 4: mod_base = OTHER; note = 2'-O-methyluridine-3'-phosphate
  modified_base 5: mod_base = OTHER; note = 2'-O-methyladenosine-3'-phosphate
  modified_base 6: mod_base = OTHER; note = 2'-O-hexadecyl-guanosine-3'-phosphate
  modified_base 7: mod_base = OTHER; note = 2'-deoxy-2'-fluorouridine-3'-phosphate
  modified_base 8: mod_base = OTHER; note = 2'-O-methyluridine-3'-phosphate
  modified_base 9: mod_base = OTHER; note = 2'-deoxy-2'-fluorouridine-3'-phosphate
  modified_base 10: mod_base = OTHER; note = 2'-deoxy-2'-fluorocytidine-3'-phosphate
  modified_base 11: mod_base = OTHER; note = 2'-deoxy-2'-fluorouridine-3'-phosphate
  modified_base 12: mod_base = OTHER; note = 2'-O-methylguanosine-3'-phosphate
  modified_base 13: mod_base = OTHER; note = 2'-O-methyluridine-3'-phosphate
  modified_base 14: mod_base = OTHER; note = 2'-O-methyladenosine-3'-phosphate
  modified_base 15: mod_base = OTHER; note = 2'-O-methyladenosine-3'-phosphate
  modified_base 16: mod_base = OTHER; note = 2'-O-methyluridine-3'-phosphate
  modified_base 17: mod_base = OTHER; note = 2'-O-methyluridine-3'-phosphate
  modified_base 18: mod_base = OTHER; note = 2'-O-methylguanosine-3'-phosphate
  modified_base 19: mod_base = OTHER; note = 2'-O-methylguanosine-3'-phosphorothioate
  modified_base 20: mod_base = OTHER; note = 2'-O-methylcytidine-3'-phosphorothioate
  modified_base 21: mod_base = OTHER; note = 2'-O-methyladenosine
tcatagtttctgtaattggca

SEQ ID NO: 304 - RNA, 23 nt, synthetic construct
  source 1..23: mol_type = other RNA
  modified_base 1: mod_base = OTHER; note = 2'-O-methyluridine-3'-phosphorothioate 5'-(E)-Vinylphosphonate
  modified_base 2: mod_base = OTHER; note = 2'-deoxy-2'-fluoroguanosine-3'-phosphorothioate
  modified_base 3: mod_base = OTHER; note = 2'-O-methylcytidine-3'-phosphate
  modified_base 4: mod_base = OTHER; note = 2'-O-methylcytidine-3'-phosphate
  modified_base 5: mod_base = OTHER; note = 2'-O-methyladenosine-3'-phosphate
  modified_base 6: mod_base = OTHER; note = 2'-deoxy-2'-fluoroadenosine-3'-phosphate
  modified_base 7: mod_base = OTHER; note = 2'-O-methyluridine-3'-phosphate
  modified_base 8: mod_base = OTHER; note = 2'-deoxy-2'-fluorouridine-3'-phosphate
  modified_base 9: mod_base = OTHER; note = 2'-deoxy-2'-fluoroadenosine-3'-phosphate
  modified_base 10: mod_base = OTHER; note = 2'-O-methylcytidine-3'-phosphate
  modified_base 11: mod_base = OTHER; note = 2'-O-methyladenosine-3'-phosphate
  modified_base 12: mod_base = OTHER; note = 2'-O-methylguanosine-3'-phosphate
  modified_base 13: mod_base = OTHER; note = 2'-O-methyladenosine-3'-phosphate
  modified_base 14: mod_base = OTHER; note = 2'-deoxy-2'-fluoroadenosine-3'-phosphate
  modified_base 15: mod_base = OTHER; note = 2'-O-methyladenosine-3'-phosphate
  modified_base 16: mod_base = OTHER; note = 2'-deoxy-2'-fluorocytidine-3'-phosphate
  modified_base 17: mod_base = OTHER; note = 2'-O-methyluridine-3'-phosphate
  modified_base 18: mod_base = OTHER; note = 2'-O-methyladenosine-3'-phosphate
  modified_base 19: mod_base = OTHER; note = 2'-O-methyluridine-3'-phosphate
  modified_base 20: mod_base = OTHER; note = 2'-O-methylguanosine-3'-phosphate
  modified_base 21: mod_base = OTHER; note = 2'-O-methyladenosine-3'-phosphorothioate
  modified_base 22: mod_base = OTHER; note = 2'-O-methyladenosine-3'-phosphorothioate
  modified_base 23: mod_base = OTHER; note = 2'-O-methylcytidine
tgccaattacagaaactatgaac

SEQ ID NO: 305 - RNA, 23 nt, synthetic construct
  source 1..23: mol_type = other RNA
gttcatagtttctgtaattggct

SEQ ID NO: 306 - RNA, 21 nt, synthetic construct
  source 1..21: mol_type = other RNA
  modified_base 1: mod_base = OTHER; note = 2'-O-methylguanosine-3'-phosphorothioate
  modified_base 2: mod_base = OTHER; note = 2'-O-methyladenosine-3'-phosphorothioate
  modified_base 3: mod_base = OTHER; note = 2'-O-methyladenosine-3'-phosphate
  modified_base 4: mod_base = OTHER; note = 2'-O-methylguanosine-3'-phosphate
  modified_base 5: mod_base = OTHER; note = 2'-O-methyluridine-3'-phosphate
  modified_base 6: mod_base = OTHER; note = 2'-O-hexadecyl-guanosine-3'-phosphate
  modified_base 7: mod_base = OTHER; note = 2'-deoxy-2'-fluorouridine-3'-phosphate
  modified_base 8: mod_base = OTHER; note = 2'-O-methylcytidine-3'-phosphate
  modified_base 9: mod_base = OTHER; note = 2'-deoxy-2'-fluorouridine-3'-phosphate
  modified_base 10: mod_base = OTHER; note = 2'-deoxy-2'-fluoroadenosine-3'-phosphate
  modified_base 11: mod_base = OTHER; note = 2'-deoxy-2'-fluoroadenosine-3'-phosphate
  modified_base 12: mod_base = OTHER; note = 2'-O-methyluridine-3'-phosphate
  modified_base 13: mod_base = OTHER; note = 2'-O-methylguanosine-3'-phosphate
  modified_base 14: mod_base = OTHER; note = 2'-O-methylcytidine-3'-phosphate
  modified_base 15: mod_base = OTHER; note = 2'-O-methyladenosine-3'-phosphate
  modified_base 16: mod_base = OTHER; note = 2'-O-methyluridine-3'-phosphate
  modified_base 17: mod_base = OTHER; note = 2'-O-methyluridine-3'-phosphate
  modified_base 18: mod_base = OTHER; note = 2'-O-methyladenosine-3'-phosphate
  modified_base 19: mod_base = OTHER; note = 2'-O-methyladenosine-3'-phosphorothioate
  modified_base 20: mod_base = OTHER; note = 2'-O-methylcytidine-3'-phosphorothioate
  modified_base 21: mod_base = OTHER; note = 2'-O-methyladenosine
gaagtgtctaatgcattaaca

SEQ ID NO: 307 - RNA, 23 nt, synthetic construct
  source 1..23: mol_type = other RNA
  modified_base 1: mod_base = OTHER; note = 2'-O-methyluridine-3'-phosphorothioate 5'-(E)-Vinylphosphonate
  modified_base 2: mod_base = OTHER; note = 2'-deoxy-2'-fluoroguanosine-3'-phosphorothioate
  modified_base 3: mod_base = OTHER; note = 2'-O-methyluridine-3'-phosphate
  modified_base 4: mod_base = OTHER; note = 2'-O-methyluridine-3'-phosphate
  modified_base 5: mod_base = OTHER; note = 2'-O-methyladenosine-3'-phosphate
  modified_base 6: mod_base = OTHER; note = 2'-deoxy-2'-fluoroadenosine-3'-phosphate
  modified_base 7: mod_base = OTHER; note = 2'-O-methyluridine-3'-phosphate
  modified_base 8: mod_base = OTHER; note = 2'-deoxy-2'-fluoroguanosine-3'-phosphate
  modified_base 9: mod_base = OTHER; note = 2'-deoxy-2'-fluorocytidine-3'-phosphate
  modified_base 10: mod_base = OTHER; note = 2'-O-methyladenosine-3'-phosphate
  modified_base 11: mod_base = OTHER; note = 2'-O-methyluridine-3'-phosphate
  modified_base 12: mod_base = OTHER; note = 2'-O-methyluridine-3'-phosphate
  modified_base 13: mod_base = OTHER; note = 2'-O-methyladenosine-3'-phosphate
  modified_base 14: mod_base = OTHER; note = 2'-deoxy-2'-fluoroguanosine-3'-phosphate
  modified_base 15: mod_base = OTHER; note = 2'-O-methyladenosine-3'-phosphate
  modified_base 16: mod_base = OTHER; note = 2'-deoxy-2'-fluorocytidine-3'-phosphate
  modified_base 17: mod_base = OTHER; note = 2'-O-methyladenosine-3'-phosphate
  modified_base 18: mod_base = OTHER; note = 2'-O-methylcytidine-3'-phosphate
  modified_base 19: mod_base = OTHER; note = 2'-O-methyluridine-3'-phosphate
  modified_base 20: mod_base = OTHER; note = 2'-O-methyluridine-3'-phosphate
  modified_base 21: mod_base = OTHER; note = 2'-O-methylcytidine-3'-phosphorothioate
  modified_base 22: mod_base = OTHER; note = 2'-O-methyladenosine-3'-phosphorothioate
  modified_base 23: mod_base = OTHER; note = 2'-O-methylguanosine
tgttaatgcattagacacttcag

SEQ ID NO: 308 - RNA, 23 nt, synthetic construct
  source 1..23: mol_type = other RNA
ctgaagtgtctaatgcattaact

SEQ ID NO: 309 - RNA, 21 nt, synthetic construct
  source 1..21: mol_type = other RNA
  modified_base 1: mod_base = OTHER; note = 2'-O-methylcytidine-3'-phosphorothioate
  modified_base 2: mod_base = OTHER; note = 2'-O-methyladenosine-3'-phosphorothioate
  modified_base 3: mod_base = OTHER; note = 2'-O-methylcytidine-3'-phosphate
  modified_base 4: mod_base = OTHER; note = 2'-O-methyluridine-3'-phosphate
  modified_base 5: mod_base = OTHER; note = 2'-O-methyluridine-3'-phosphate
  modified_base 6: mod_base = OTHER; note = 2'-O-hexadecyl-uridine-3'-phosphate
  modified_base 7: mod_base = OTHER; note = 2'-deoxy-2'-fluoroguanosine-3'-phosphate
  modified_base 8: mod_base = OTHER; note = 2'-O-methyluridine-3'-phosphate
  modified_base 9: mod_base = OTHER; note = 2'-deoxy-2'-fluoroguanosine-3'-phosphate
  modified_base 10: mod_base = OTHER; note = 2'-deoxy-2'-fluoroadenosine-3'-phosphate
  modified_base 11: mod_base = OTHER; note = 2'-deoxy-2'-fluoroguanosine-3'-phosphate
  modified_base 12: mod_base = OTHER; note = 2'-O-methyluridine-3'-phosphate
  modified_base 13: mod_base = OTHER; note = 2'-O-methyladenosine-3'-phosphate
  modified_base 14: mod_base = OTHER; note = 2'-O-methyluridine-3'-phosphate
  modified_base 15: mod_base = OTHER; note = 2'-O-methyluridine-3'-phosphate
  modified_base 16: mod_base = OTHER; note = 2'-O-methylcytidine-3'-phosphate
  modified_base 17: mod_base = OTHER; note = 2'-O-methyluridine-3'-phosphate
  modified_base 18: mod_base = OTHER; note = 2'-O-methyladenosine-3'-phosphate
  modified_base 19: mod_base = OTHER; note = 2'-O-methyluridine-3'-phosphorothioate
  modified_base 20: mod_base = OTHER; note = 2'-O-methylguanosine-3'-phosphorothioate
  modified_base 21: mod_base = OTHER; note = 2'-O-methyladenosine
cactttgtgagtattctatga

SEQ ID NO: 310 - RNA, 23 nt, synthetic construct
  source 1..23: mol_type = other RNA
  modified_base 1: mod_base = OTHER; note = 2'-O-methyluridine-3'-phosphorothioate 5'-(E)-Vinylphosphonate
  modified_base 2: mod_base = OTHER; note = 2'-deoxy-2'-fluorocytidine-3'-phosphorothioate
  modified_base 3: mod_base = OTHER; note = 2'-O-methyladenosine-3'-phosphate
  modified_base 4: mod_base = OTHER; note = 2'-O-methyluridine-3'-phosphate
  modified_base 5: mod_base = OTHER; note = 2'-O-methyladenosine-3'-phosphate
  modified_base 6: mod_base = OTHER; note = 2'-deoxy-2'-fluoroguanosine-3'-phosphate
  modified_base 7: mod_base = OTHER; note = 2'-O-methyladenosine-3'-phosphate
  modified_base 8: mod_base = OTHER; note = 2'-deoxy-2'-fluoroadenosine-3'-phosphate
  modified_base 9: mod_base = OTHER; note = 2'-deoxy-2'-fluorouridine-3'-phosphate
  modified_base 10: mod_base = OTHER; note = 2'-O-methyladenosine-3'-phosphate
  modified_base 11: mod_base = OTHER; note = 2'-O-methylcytidine-3'-phosphate
  modified_base 12: mod_base = OTHER; note = 2'-O-methyluridine-3'-phosphate
  modified_base 13: mod_base = OTHER; note = 2'-O-methylcytidine-3'-phosphate
  modified_base 14: mod_base = OTHER; note = 2'-deoxy-2'-fluoroadenosine-3'-phosphate
  modified_base 15: mod_base = OTHER; note = 2'-O-methylcytidine-3'-phosphate
  modified_base 16: mod_base = OTHER; note = 2'-deoxy-2'-fluoroadenosine-3'-phosphate
  modified_base 17: mod_base = OTHER; note = 2'-O-methyladenosine-3'-phosphate
  modified_base 18: mod_base = OTHER; note = 2'-O-methyladenosine-3'-phosphate
  modified_base 19: mod_base = OTHER; note = 2'-O-methylguanosine-3'-phosphate
  modified_base 20: mod_base = OTHER; note = 2'-O-methyluridine-3'-phosphate
  modified_base 21: mod_base = OTHER; note = 2'-O-methylguanosine-3'-phosphorothioate
  modified_base 22: mod_base = OTHER; note = 2'-O-methylcytidine-3'-phosphorothioate
  modified_base 23: mod_base = OTHER; note = 2'-O-methyladenosine
tcatagaatactcacaaagtgca

SEQ ID NO: 311 - RNA, 23 nt, synthetic construct
  source 1..23: mol_type = other RNA
tgcactttgtgagtattctatgt

SEQ ID NO: 312 - RNA, 21 nt, synthetic construct
  source 1..21: mol_type = other RNA
  modified_base 1: mod_base = OTHER; note = 2'-O-methylguanosine-3'-phosphorothioate
  modified_base 2: mod_base = OTHER; note = 2'-O-methylguanosine-3'-phosphorothioate
  modified_base 3: mod_base = OTHER; note = 2'-O-methyluridine-3'-phosphate
  modified_base 4: mod_base = OTHER; note = 2'-O-methyladenosine-3'-phosphate
  modified_base 5: mod_base = OTHER; note = 2'-O-methylcytidine-3'-phosphate
  modified_base 6: mod_base = OTHER; note = 2'-O-hexadecyl-uridine-3'-phosphate
  modified_base 7: mod_base = OTHER; note = 2'-deoxy-2'-fluoroguanosine-3'-phosphate
  modified_base 8: mod_base = OTHER; note = 2'-O-methyladenosine-3'-phosphate
  modified_base 9: mod_base = OTHER; note = 2'-deoxy-2'-fluoroadenosine-3'-phosphate
  modified_base 10: mod_base = OTHER; note = 2'-deoxy-2'-fluorouridine-3'-phosphate
  modified_base 11: mod_base = OTHER; note = 2'-deoxy-2'-fluoroadenosine-3'-phosphate
  modified_base 12: mod_base = OTHER; note = 2'-O-methylcytidine-3'-phosphate
  modified_base 13: mod_base = OTHER; note = 2'-O-methyluridine-3'-phosphate
  modified_base 14: mod_base = OTHER; note = 2'-O-methyluridine-3'-phosphate
  modified_base 15: mod_base = OTHER; note = 2'-O-methyladenosine-3'-phosphate
  modified_base 16: mod_base = OTHER; note = 2'-O-methyladenosine-3'-phosphate
  modified_base 17: mod_base = OTHER; note = 2'-O-methyluridine-3'-phosphate
  modified_base 18: mod_base = OTHER; note = 2'-O-methyladenosine-3'-phosphate
  modified_base 19: mod_base = OTHER; note = 2'-O-methyluridine-3'-phosphorothioate
  modified_base 20: mod_base = OTHER; note = 2'-O-methylguanosine-3'-phosphorothioate
  modified_base 21: mod_base = OTHER; note = 2'-O-methyladenosine
ggtactgaatacttaatatga

SEQ ID NO: 313 - RNA, 23 nt, synthetic construct
  source 1..23: mol_type = other RNA
  modified_base 1: mod_base = OTHER; note = 2'-O-methyluridine-3'-phosphorothioate 5'-(E)-Vinylphosphonate
  modified_base 2: mod_base = OTHER; note = 2'-deoxy-2'-fluorocytidine-3'-phosphorothioate
  modified_base 3: mod_base = OTHER; note = 2'-O-methyladenosine-3'-phosphate
  modified_base 4: mod_base = OTHER; note = 2'-O-methyluridine-3'-phosphate
  modified_base 5: mod_base = OTHER; note = 2'-O-methyladenosine-3'-phosphate
  modified_base 6: mod_base = OTHER; note = 2'-deoxy-2'-fluorouridine-3'-phosphate
  modified_base 7: mod_base = OTHER; note = 2'-O-methyluridine-3'-phosphate
  modified_base 8: mod_base = OTHER; note = 2'-deoxy-2'-fluoroadenosine-3'-phosphate
  modified_base 9: mod_base = OTHER; note = 2'-deoxy-2'-fluoroadenosine-3'-phosphate
  modified_base 10: mod_base = OTHER; note = 2'-O-methylguanosine-3'-phosphate
  modified_base 11: mod_base = OTHER; note = 2'-O-methyluridine-3'-phosphate
  modified_base 12: mod_base = OTHER; note = 2'-O-methyladenosine-3'-phosphate
  modified_base 13: mod_base = OTHER; note = 2'-O-methyluridine-3'-phosphate
  modified_base 14: mod_base = OTHER; note = 2'-deoxy-2'-fluorouridine-3'-phosphate
  modified_base 15: mod_base = OTHER; note = 2'-O-methylcytidine-3'-phosphate
  modified_base 16: mod_base = OTHER; note = 2'-deoxy-2'-fluoroadenosine-3'-phosphate
  modified_base 17: mod_base = OTHER; note = 2'-O-methylguanosine-3'-phosphate
  modified_base 18: mod_base = OTHER; note = 2'-O-methyluridine-3'-phosphate
  modified_base 19: mod_base = OTHER; note = 2'-O-methyladenosine-3'-phosphate
  modified_base 20: mod_base = OTHER; note = 2'-O-methylcytidine-3'-phosphate
  modified_base 21: mod_base = OTHER; note = 2'-O-methylcytidine-3'-phosphorothioate
  modified_base 22: mod_base = OTHER; note = 2'-O-methyluridine-3'-phosphorothioate
  modified_base 23: mod_base = OTHER; note = 2'-O-methyluridine
tcatattaagtattcagtacctt

SEQ ID NO: 314 - RNA, 23 nt, synthetic construct
  source 1..23: mol_type = other RNA
aaggtactgaatacttaatatgt

SEQ ID NO: 315 - RNA, 21 nt, synthetic construct
  source 1..21: mol_type = other RNA
  modified_base 1: mod_base = OTHER; note = 2'-O-methyluridine-3'-phosphorothioate
  modified_base 2: mod_base = OTHER; note = 2'-O-methyladenosine-3'-phosphorothioate
  modified_base 3: mod_base = OTHER; note = 2'-O-methyluridine-3'-phosphate
  modified_base 4: mod_base = OTHER; note = 2'-O-methyluridine-3'-phosphate
  modified_base 5: mod_base = OTHER; note = 2'-O-methylguanosine-3'-phosphate
  modified_base 6: mod_base = OTHER; note = 2'-O-hexadecyl-guanosine-3'-phosphate
  modified_base 7: mod_base = OTHER; note = 2'-deoxy-2'-fluorocytidine-3'-phosphate
  modified_base 8: mod_base = OTHER; note = 2'-O-methyluridine-3'-phosphate
  modified_base 9: mod_base = OTHER; note = 2'-deoxy-2'-fluorouridine-3'-phosphate
  modified_base 10: mod_base = OTHER; note = 2'-deoxy-2'-fluoroguanosine-3'-phosphate
  modified_base 11: mod_base = OTHER; note = 2'-deoxy-2'-fluorocytidine-3'-phosphate
  modified_base 12: mod_base = OTHER; note = 2'-O-methyladenosine-3'-phosphate
  modified_base 13: mod_base = OTHER; note = 2'-O-methylcytidine-3'-phosphate
  modified_base 14: mod_base = OTHER; note = 2'-O-methyluridine-3'-phosphate
  modified_base 15: mod_base = OTHER; note = 2'-O-methyluridine-3'-phosphate
  modified_base 16: mod_base = OTHER; note = 2'-O-methyluridine-3'-phosphate
  modified_base 17: mod_base = OTHER; note = 2'-O-methylguanosine-3'-phosphate
  modified_base 18: mod_base = OTHER; note = 2'-O-methyluridine-3'-phosphate
  modified_base 19: mod_base = OTHER; note = 2'-O-methylguanosine-3'-phosphorothioate
  modified_base 20: mod_base = OTHER; note = 2'-O-methyladenosine-3'-phosphorothioate
  modified_base 21: mod_base = OTHER; note = 2'-O-methyladenosine
tattggcttgcactttgtgaa

SEQ ID NO: 316 - RNA, 23 nt, synthetic construct
  source 1..23: mol_type = other RNA
  modified_base 1: mod_base = OTHER; note = 2'-O-methyluridine-3'-phosphorothioate 5'-(E)-Vinylphosphonate
  modified_base 2: mod_base = OTHER; note = 2'-deoxy-2'-fluorouridine-3'-phosphorothioate
  modified_base 3: mod_base = OTHER; note = 2'-O-methylcytidine-3'-phosphate
  modified_base 4: mod_base = OTHER; note = 2'-O-methyladenosine-3'-phosphate
  modified_base 5: mod_base = OTHER; note = 2'-O-methylcytidine-3'-phosphate
  modified_base 6: mod_base = OTHER; note = 2'-deoxy-2'-fluoroadenosine-3'-phosphate
  modified_base 7: mod_base = OTHER; note = 2'-O-methyladenosine-3'-phosphate
  modified_base 8: mod_base = OTHER; note = 2'-deoxy-2'-fluoroadenosine-3'-phosphate
  modified_base 9: mod_base = OTHER; note = 2'-deoxy-2'-fluoroguanosine-3'-phosphate
  modified_base 10: mod_base = OTHER; note = 2'-O-methyluridine-3'-phosphate
  modified_base 11: mod_base = OTHER; note = 2'-O-methylguanosine-3'-phosphate
  modified_base 12: mod_base = OTHER; note = 2'-O-methylcytidine-3'-phosphate
  modified_base 13: mod_base = OTHER; note = 2'-O-methyladenosine-3'-phosphate
  modified_base 14: mod_base = OTHER; note = 2'-deoxy-2'-fluoroadenosine-3'-phosphate
  modified_base 15: mod_base = OTHER; note = 2'-O-methylguanosine-3'-phosphate
  modified_base 16: mod_base = OTHER; note = 2'-deoxy-2'-fluorocytidine-3'-phosphate
  modified_base 17: mod_base = OTHER; note = 2'-O-methylcytidine-3'-phosphate
  modified_base 18: mod_base = OTHER; note = 2'-O-methyladenosine-3'-phosphate
  modified_base 19: mod_base = OTHER; note = 2'-O-methyladenosine-3'-phosphate
  modified_base 20: mod_base = OTHER; note = 2'-O-methyluridine-3'-phosphate
  modified_base 21: mod_base = OTHER; note = 2'-O-methyladenosine-3'-phosphorothioate
  modified_base 22: mod_base = OTHER; note = 2'-O-methyladenosine-3'-phosphorothioate
  modified_base 23: mod_base = OTHER; note = 2'-O-methyluridine
ttcacaaagtgcaagccaataat

SEQ ID NO: 317 - RNA, 23 nt, synthetic construct
  source 1..23: mol_type = other RNA
attattggcttgcactttgtgag

SEQ ID NO: 318 - RNA, 21 nt, synthetic construct
  source 1..21: mol_type = other RNA
  modified_base 1: mod_base = OTHER; note = 2'-O-methyluridine-3'-phosphorothioate
  modified_base 2: mod_base = OTHER; note = 2'-O-methyluridine-3'-phosphorothioate
  modified_base 3: mod_base = OTHER; note = 2'-O-methylguanosine-3'-phosphate
  modified_base 4: mod_base = OTHER; note = 2'-O-methyluridine-3'-phosphate
  modified_base 5: mod_base = OTHER; note = 2'-O-methyladenosine-3'-phosphate
  modified_base 6: mod_base = OTHER; note = 2'-O-hexadecyl-adenosine-3'-phosphate
  modified_base 7: mod_base = OTHER; note = 2'-deoxy-2'-fluoroguanosine-3'-phosphate
  modified_base 8: mod_base = OTHER; note = 2'-O-methylguanosine-3'-phosphate
  modified_base 9: mod_base = OTHER; note = 2'-deoxy-2'-fluorouridine-3'-phosphate
  modified_base 10: mod_base = OTHER; note = 2'-deoxy-2'-fluoroadenosine-3'-phosphate
  modified_base 11: mod_base = OTHER; note = 2'-deoxy-2'-fluorocytidine-3'-phosphate
  modified_base 12: mod_base = OTHER; note = 2'-O-methyluridine-3'-phosphate
  modified_base 13: mod_base = OTHER; note = 2'-O-methylguanosine-3'-phosphate
  modified_base 14: mod_base = OTHER; note = 2'-O-methyladenosine-3'-phosphate
  modified_base 15: mod_base = OTHER; note = 2'-O-methyladenosine-3'-phosphate
  modified_base 16: mod_base = OTHER; note = 2'-O-methyluridine-3'-phosphate
  modified_base 17: mod_base = OTHER; note = 2'-O-methyladenosine-3'-phosphate
  modified_base 18: mod_base = OTHER; note = 2'-O-methylcytidine-3'-phosphate
  modified_base 19: mod_base = OTHER; note = 2'-O-methyluridine-3'-phosphorothioate
  modified_base 20: mod_base = OTHER; note = 2'-O-methyluridine-3'-phosphorothioate
  modified_base 21: mod_base = OTHER; note = 2'-O-methyladenosine
ttgtaaggtactgaatactta

SEQ ID NO: 319 - RNA, 23 nt, synthetic construct
  source 1..23: mol_type = other RNA
  modified_base 1: mod_base = OTHER; note = 2'-O-methyluridine-3'-phosphorothioate 5'-(E)-Vinylphosphonate
  modified_base 2: mod_base = OTHER; note = 2'-deoxy-2'-fluoroadenosine-3'-phosphorothioate
  modified_base 3: mod_base = OTHER; note = 2'-O-methyladenosine-3'-phosphate
  modified_base 4: mod_base = OTHER; note = 2'-O-methylguanosine-3'-phosphate
  modified_base 5: mod_base = OTHER; note = 2'-O-methyluridine-3'-phosphate
  modified_base 6: mod_base = OTHER; note = 2'-deoxy-2'-fluoroadenosine-3'-phosphate
  modified_base 7: mod_base = OTHER; note = 2'-O-methyluridine-3'-phosphate
  modified_base 8: mod_base = OTHER; note = 2'-deoxy-2'-fluorouridine-3'-phosphate
  modified_base 9: mod_base = OTHER; note = 2'-deoxy-2'-fluorocytidine-3'-phosphate
  modified_base 10: mod_base = OTHER; note = 2'-O-methyladenosine-3'-phosphate
  modified_base 11: mod_base = OTHER; note = 2'-O-methylguanosine-3'-phosphate
  modified_base 12: mod_base = OTHER; note = 2'-O-methyluridine-3'-phosphate
  modified_base 13: mod_base = OTHER; note = 2'-O-methyladenosine-3'-phosphate
  modified_base 14: mod_base = OTHER; note = 2'-deoxy-2'-fluorocytidine-3'-phosphate
  modified_base 15: mod_base = OTHER; note = 2'-O-methylcytidine-3'-phosphate
  modified_base 16: mod_base = OTHER; note = 2'-deoxy-2'-fluorouridine-3'-phosphate
  modified_base 17: mod_base = OTHER; note = 2'-O-methyluridine-3'-phosphate
  modified_base 18: mod_base = OTHER; note = 2'-O-methyladenosine-3'-phosphate
  modified_base 19: mod_base = OTHER; note = 2'-O-methylcytidine-3'-phosphate
  modified_base 20: mod_base = OTHER; note = 2'-O-methyladenosine-3'-phosphate
  modified_base 21: mod_base = OTHER; note = 2'-O-methyladenosine-3'-phosphorothioate
  modified_base 22: mod_base = OTHER; note = 2'-O-methyladenosine-3'-phosphorothioate
  modified_base 23: mod_base = OTHER; note = 2'-O-methyladenosine
taagtattcagtaccttacaaaa

SEQ ID NO: 320 - RNA, 23 nt, synthetic construct
  source 1..23: mol_type = other RNA
ttttgtaaggtactgaatactta

SEQ ID NO: 321 - RNA, 21 nt, synthetic construct
  source 1..21: mol_type = other RNA
  modified_base 1: mod_base = OTHER; note = 2'-O-methyluridine-3'-phosphorothioate
  modified_base 2: mod_base = OTHER; note = 2'-O-methyluridine-3'-phosphorothioate
  modified_base 3: mod_base = OTHER; note = 2'-O-methylguanosine-3'-phosphate
  modified_base 4: mod_base = OTHER; note = 2'-O-methylcytidine-3'-phosphate
  modified_base 5: mod_base = OTHER; note = 2'-O-methyladenosine-3'-phosphate
  modified_base 6: mod_base = OTHER; note = 2'-O-hexadecyl-cytidine-3'-phosphate
  modified_base 7: mod_base = OTHER; note = 2'-deoxy-2'-fluorouridine-3'-phosphate
  modified_base 8: mod_base = OTHER; note = 2'-O-methyluridine-3'-phosphate
  modified_base 9: mod_base = OTHER; note = 2'-deoxy-2'-fluorouridine-3'-phosphate
  modified_base 10: mod_base = OTHER; note = 2'-deoxy-2'-fluoroguanosine-3'-phosphate
  modified_base 11: mod_base = OTHER; note = 2'-deoxy-2'-fluorouridine-3'-phosphate
  modified_base 12: mod_base = OTHER; note = 2'-O-methylguanosine-3'-phosphate
  modified_base 13: mod_base = OTHER; note = 2'-O-methyladenosine-3'-phosphate
  modified_base 14: mod_base = OTHER; note = 2'-O-methylguanosine-3'-phosphate
  modified_base 15: mod_base = OTHER; note = 2'-O-methyluridine-3'-phosphate
  modified_base 16: mod_base = OTHER; note = 2'-O-methyladenosine-3'-phosphate
  modified_base 17: mod_base = OTHER; note = 2'-O-methyluridine-3'-phosphate
  modified_base 18: mod_base = OTHER; note = 2'-O-methyluridine-3'-phosphate
  modified_base 19: mod_base = OTHER; note = 2'-O-methylcytidine-3'-phosphorothioate
  modified_base 20: mod_base = OTHER; note = 2'-O-methyluridine-3'-phosphorothioate
  modified_base 21: mod_base = OTHER; note = 2'-O-methyladenosine
ttgcactttgtgagtattcta

SEQ ID NO: 322 - RNA, 23 nt, synthetic construct
  source 1..23: mol_type = other RNA
  modified_base 1: mod_base = OTHER; note = 2'-O-methyluridine-3'-phosphorothioate 5'-(E)-Vinylphosphonate
  modified_base 2: mod_base = OTHER; note = 2'-deoxy-2'-fluoroadenosine-3'-phosphorothioate
  modified_base 3: mod_base = OTHER; note = 2'-O-methylguanosine-3'-phosphate
  modified_base 4: mod_base = OTHER; note = 2'-O-methyladenosine-3'-phosphate
  modified_base 5: mod_base = OTHER; note = 2'-O-methyladenosine-3'-phosphate
  modified_base 6: mod_base = OTHER; note = 2'-deoxy-2'-fluorouridine-3'-phosphate
  modified_base 7: mod_base = OTHER; note = 2'-O-methyladenosine-3'-phosphate
  modified_base 8: mod_base = OTHER; note = 2'-deoxy-2'-fluorocytidine-3'-phosphate
  modified_base 9: mod_base = OTHER; note = 2'-deoxy-2'-fluorouridine-3'-phosphate
  modified_base 10: mod_base = OTHER; note = 2'-O-methylcytidine-3'-phosphate
  modified_base 11: mod_base = OTHER; note = 2'-O-methyladenosine-3'-phosphate
  modified_base 12: mod_base = OTHER; note = 2'-O-methylcytidine-3'-phosphate
  modified_base 13: mod_base = OTHER; note = 2'-O-methyladenosine-3'-phosphate
  modified_base 14: mod_base = OTHER; note = 2'-deoxy-2'-fluoroadenosine-3'-phosphate
  modified_base 15: mod_base = OTHER; note = 2'-O-methyladenosine-3'-phosphate
  modified_base 16: mod_base = OTHER; note = 2'-deoxy-2'-fluoroguanosine-3'-phosphate
  modified_base 17: mod_base = OTHER; note = 2'-O-methyluridine-3'-phosphate
  modified_base 18: mod_base = OTHER; note = 2'-O-methylguanosine-3'-phosphate
  modified_base 19: mod_base = OTHER; note = 2'-O-methylcytidine-3'-phosphate
  modified_base 20: mod_base = OTHER; note = 2'-O-methyladenosine-3'-phosphate
  modified_base 21: mod_base = OTHER; note = 2'-O-methyladenosine-3'-phosphorothioate
  modified_base 22: mod_base = OTHER; note = 2'-O-methylguanosine-3'-phosphorothioate
  modified_base 23: mod_base = OTHER; note = 2'-O-methylcytidine
tagaatactcacaaagtgcaagc

SEQ ID NO: 323 - RNA, 23 nt, synthetic construct
  source 1..23: mol_type = other RNA
gcttgcactttgtgagtattcta

SEQ ID NO: 324 - RNA, 21 nt, synthetic construct
  source 1..21: mol_type = other RNA
  modified_base 1: mod_base = OTHER; note = 2'-O-methyluridine-3'-phosphorothioate
  modified_base 2: mod_base = OTHER; note = 2'-O-methylguanosine-3'-phosphorothioate
  modified_base 3: mod_base = OTHER; note = 2'-O-methyluridine-3'-phosphate
  modified_base 4: mod_base = OTHER; note = 2'-O-methylguanosine-3'-phosphate
  modified_base 5: mod_base = OTHER; note = 2'-O-methylcytidine-3'-phosphate
  modified_base 6: mod_base = OTHER; note = 2'-O-hexadecyl-adenosine-3'-phosphate
  modified_base 7: mod_base = OTHER; note = 2'-deoxy-2'-fluorocytidine-3'-phosphate
  modified_base 8: mod_base = OTHER; note = 2'-O-methyluridine-3'-phosphate
  modified_base 9: mod_base = OTHER; note = 2'-deoxy-2'-fluoroguanosine-3'-phosphate
  modified_base 10: mod_base = OTHER; note = 2'-deoxy-2'-fluoroadenosine-3'-phosphate
  modified_base 11: mod_base = OTHER; note = 2'-deoxy-2'-fluoroadenosine-3'-phosphate
  modified_base 12: mod_base = OTHER; note = 2'-O-methyluridine-3'-phosphate
  modified_base 13: mod_base = OTHER; note = 2'-O-methylcytidine-3'-phosphate
  modified_base 14: mod_base = OTHER; note = 2'-O-methylguanosine-3'-phosphate
  modified_base 15: mod_base = OTHER; note = 2'-O-methyluridine-3'-phosphate
  modified_base 16: mod_base = OTHER; note = 2'-O-methyluridine-3'-phosphate
  modified_base 17: mod_base = OTHER; note = 2'-O-methyluridine-3'-phosphate
  modified_base 18: mod_base = OTHER; note = 2'-O-methylcytidine-3'-phosphate
  modified_base 19: mod_base = OTHER; note = 2'-O-methyladenosine-3'-phosphorothioate
  modified_base 20: mod_base = OTHER; note = 2'-O-methyluridine-3'-phosphorothioate
  modified_base 21: mod_base = OTHER; note = 2'-O-methyladenosine
tgtgcactgaatcgtttcata

SEQ ID NO: 325 - RNA, 23 nt, synthetic construct
  source 1..23: mol_type = other RNA
  modified_base 1: mod_base = OTHER; note = 2'-O-methyluridine-3'-phosphorothioate 5'-(E)-Vinylphosphonate
  modified_base 2: mod_base = OTHER; note = 2'-deoxy-2'-fluoroadenosine-3'-phosphorothioate
  modified_base 3: mod_base = OTHER; note = 2'-O-methyluridine-3'-phosphate
  modified_base 4: mod_base = OTHER; note = 2'-O-methylguanosine-3'-phosphate
  modified_base 5: mod_base = OTHER; note = 2'-O-methyladenosine-3'-phosphate
  modified_base 6: mod_base = OTHER; note = 2'-deoxy-2'-fluoroadenosine-3'-phosphate
  modified_base 7: mod_base = OTHER; note = 2'-O-methyladenosine-3'-phosphate
  modified_base 8: mod_base = OTHER; note = 2'-deoxy-2'-fluorocytidine-3'-phosphate
  modified_base 9: mod_base = OTHER; note = 2'-deoxy-2'-fluoroguanosine-3'-phosphate
  modified_base 10: mod_base = OTHER; note = 2'-O-methyladenosine-3'-phosphate
  modified_base 11: mod_base = OTHER; note = 2'-O-methyluridine-3'-phosphate
  modified_base 12: mod_base = OTHER; note = 2'-O-methyluridine-3'-phosphate
  modified_base 13: mod_base = OTHER; note = 2'-O-methylcytidine-3'-phosphate
  modified_base 14: mod_base = OTHER; note = 2'-deoxy-2'-fluoroadenosine-3'-phosphate
  modified_base 15: mod_base = OTHER; note = 2'-O-methylguanosine-3'-phosphate
  modified_base 16: mod_base = OTHER; note = 2'-deoxy-2'-fluorouridine-3'-phosphate
  modified_base 17: mod_base = OTHER; note = 2'-O-methylguanosine-3'-phosphate
  modified_base 18: mod_base = OTHER; note = 2'-O-methylcytidine-3'-phosphate
  modified_base 19: mod_base = OTHER; note = 2'-O-methyladenosine-3'-phosphate
  modified_base 20: mod_base = OTHER; note = 2'-O-methylcytidine-3'-phosphate
  modified_base 21: mod_base = OTHER; note = 2'-O-methyladenosine-3'-phosphorothioate
  modified_base 22: mod_base = OTHER; note = 2'-O-methyluridine-3'-phosphorothioate
  modified_base 23: mod_base = OTHER; note = 2'-O-methyluridine
tatgaaacgattcagtgcacatt

SEQ ID NO: 326 - RNA, 23 nt, synthetic construct
  source 1..23: mol_type = other RNA
aatgtgcactgaatcgtttcatg

SEQ ID NO: 327 - RNA, 21 nt, synthetic construct
  source 1..21: mol_type = other RNA
  modified_base 1: mod_base = OTHER; note = 2'-O-methyluridine-3'-phosphorothioate
  modified_base 2: mod_base = OTHER; note = 2'-O-methyluridine-3'-phosphorothioate
  modified_base 3: mod_base = OTHER; note = 2'-O-methyluridine-3'-phosphate
  modified_base 4: mod_base = OTHER; note = 2'-O-methylcytidine-3'-phosphate
  modified_base 5: mod_base = OTHER; note = 2'-O-methyluridine-3'-phosphate
  modified_base 6: mod_base = OTHER; note = 2'-O-hexadecyl-guanosine-3'-phosphate
  modified_base 7: mod_base = OTHER; note = 2'-deoxy-2'-fluorouridine-3'-phosphate
  modified_base 8: mod_base = OTHER; note = 2'-O-methylcytidine-3'-phosphate
  modified_base 9: mod_base = OTHER; note = 2'-deoxy-2'-fluorouridine-3'-phosphate
  modified_base 10: mod_base = OTHER; note = 2'-deoxy-2'-fluorocytidine-3'-phosphate
  modified_base 11: mod_base = OTHER; note = 2'-deoxy-2'-fluoroadenosine-3'-phosphate
  modified_base 12: mod_base = OTHER; note = 2'-O-methyluridine-3'-phosphate
  modified_base 13: mod_base = OTHER; note = 2'-O-methyladenosine-3'-phosphate
  modified_base 14: mod_base = OTHER; note = 2'-O-methyladenosine-3'-phosphate
  modified_base 15: mod_base = OTHER; note = 2'-O-methyluridine-3'-phosphate
  modified_base 16: mod_base = OTHER; note = 2'-O-methyluridine-3'-phosphate
  modified_base 17: mod_base = OTHER; note = 2'-O-methylguanosine-3'-phosphate
  modified_base 18: mod_base = OTHER; note = 2'-O-methyluridine-3'-phosphate
  modified_base 19: mod_base = OTHER; note = 2'-O-methylcytidine-3'-phosphorothioate
  modified_base 20: mod_base = OTHER; note = 2'-O-methyladenosine-3'-phosphorothioate
  modified_base 21: mod_base = OTHER; note = 2'-O-methyladenosine
tttctgtctcataattgtcaa

SEQ ID NO: 328 - RNA, 23 nt, synthetic construct
  source 1..23: mol_type = other RNA
  modified_base 1: mod_base = OTHER; note = 2'-O-methyluridine-3'-phosphorothioate 5'-(E)-Vinylphosphonate
  modified_base 2: mod_base = OTHER; note = 2'-deoxy-2'-fluorouridine-3'-phosphorothioate
  modified_base 3: mod_base = OTHER; note = 2'-O-methylguanosine-3'-phosphate
  modified_base 4: mod_base = OTHER; note = 2'-O-methyladenosine-3'-phosphate
  modified_base 5: mod_base = OTHER; note = 2'-O-methylcytidine-3'-phosphate
  modified_base 6: mod_base = OTHER; note = 2'-deoxy-2'-fluoroadenosine-3'-phosphate
  modified_base 7: mod_base = OTHER; note = 2'-O-methyladenosine-3'-phosphate
  modified_base 8: mod_base = OTHER; note = 2'-deoxy-2'-fluorouridine-3'-phosphate
  modified_base 9: mod_base = OTHER; note = 2'-deoxy-2'-fluorouridine-3'-phosphate
  modified_base 10: mod_base = OTHER; note = 2'-O-methyladenosine-3'-phosphate
  modified_base 11: mod_base = OTHER; note = 2'-O-methyluridine-3'-phosphate
  modified_base 12: mod_base = OTHER; note = 2'-O-methylguanosine-3'-phosphate
  modified_base 13: mod_base = OTHER; note = 2'-O-methyladenosine-3'-phosphate
  modified_base 14: mod_base = OTHER; note = 2'-deoxy-2'-fluoroguanosine-3'-phosphate
  modified_base 15: mod_base = OTHER; note = 2'-O-methyladenosine-3'-phosphate
  modified_base 16: mod_base = OTHER; note = 2'-deoxy-2'-fluorocytidine-3'-phosphate
  modified_base 17: mod_base = OTHER; note = 2'-O-methyladenosine-3'-phosphate
  modified_base 18: mod_base = OTHER; note = 2'-O-methylguanosine-3'-phosphate
  modified_base 19: mod_base = OTHER; note = 2'-O-methyladenosine-3'-phosphate
  modified_base 20: mod_base = OTHER; note = 2'-O-methyladenosine-3'-phosphate
  modified_base 21: mod_base = OTHER; note = 2'-O-methyladenosine-3'-phosphorothioate
  modified_base 22: mod_base = OTHER; note = 2'-O-methyluridine-3'-phosphorothioate
  modified_base 23: mod_base = OTHER; note = 2'-O-methyladenosine
ttgacaattatgagacagaaata

SEQ ID NO: 329 - RNA, 23 nt, synthetic construct
  source 1..23: mol_type = other RNA
tatttctgtctcataattgtcaa

SEQ ID NO: 330 - RNA, 21 nt, synthetic construct
  source 1..21: mol_type = other RNA
  modified_base 1: mod_base = OTHER; note = 2'-O-methylguanosine-3'-phosphorothioate
  modified_base 2: mod_base = OTHER; note = 2'-O-methyluridine-3'-phosphorothioate
  modified_base 3: mod_base = OTHER; note = 2'-O-methyluridine-3'-phosphate
  modified_base 4: mod_base = OTHER; note = 2'-O-methylcytidine-3'-phosphate
  modified_base 5: mod_base = OTHER; note = 2'-O-methyladenosine-3'-phosphate
  modified_base 6: mod_base = OTHER; note = 2'-O-hexadecyl-uridine-3'-phosphate
  modified_base 7: mod_base = OTHER; note = 2'-deoxy-2'-fluoroadenosine-3'-phosphate
  modified_base 8: mod_base = OTHER; note = 2'-O-methylguanosine-3'-phosphate
  modified_base 9: mod_base = OTHER; note = 2'-deoxy-2'-fluorouridine-3'-phosphate
  modified_base 10: mod_base = OTHER; note = 2'-deoxy-2'-fluorouridine-3'-phosphate
  modified_base 11: mod_base = OTHER; note = 2'-deoxy-2'-fluorouridine-3'-phosphate
  modified_base 12: mod_base = OTHER; note = 2'-O-methylcytidine-3'-phosphate
  modified_base 13: mod_base = OTHER; note = 2'-O-methyluridine-3'-phosphate
  modified_base 14: mod_base = OTHER; note = 2'-O-methylguanosine-3'-phosphate
  modified_base 15: mod_base = OTHER; note = 2'-O-methyluridine-3'-phosphate
  modified_base 16: mod_base = OTHER; note = 2'-O-methyladenosine-3'-phosphate
  modified_base 17: mod_base = OTHER; note = 2'-O-methyladenosine-3'-phosphate
  modified_base 18: mod_base = OTHER; note = 2'-O-methyluridine-3'-phosphate
  modified_base 19: mod_base = OTHER; note = 2'-O-methyluridine-3'-phosphorothioate
  modified_base 20: mod_base = OTHER; note = 2'-O-methylguanosine-3'-phosphorothioate
  modified_base 21: mod_base = OTHER; note = 2'-O-methyladenosine
gttcatagtttctgtaattga

SEQ ID NO: 331 - RNA, 23 nt, synthetic construct
  source 1..23: mol_type = other RNA
  modified_base 1: mod_base = OTHER; note = 2'-O-methyluridine-3'-phosphorothioate 5'-(E)-Vinylphosphonate
  modified_base 2: mod_base = OTHER; note = 2'-deoxy-2'-fluorocytidine-3'-phosphorothioate
  modified_base 3: mod_base = OTHER; note = 2'-O-methyladenosine-3'-phosphate
  modified_base 4: mod_base = OTHER; note = 2'-O-methyladenosine-3'-phosphate
  modified_base 5: mod_base = OTHER; note = 2'-O-methyluridine-3'-phosphate
  modified_base 6: mod_base = OTHER; note = 2'-deoxy-2'-fluorouridine-3'-phosphate
  modified_base 7: mod_base = OTHER; note = 2'-O-methyladenosine-3'-phosphate
  modified_base 8: mod_base = OTHER; note = 2'-deoxy-2'-fluorocytidine-3'-phosphate
  modified_base 9: mod_base = OTHER; note = 2'-deoxy-2'-fluoroadenosine-3'-phosphate
  modified_base 10: mod_base = OTHER; note = 2'-O-methylguanosine-3'-phosphate
  modified_base 11: mod_base = OTHER; note = 2'-O-methyladenosine-3'-phosphate
  modified_base 12: mod_base = OTHER; note = 2'-O-methyladenosine-3'-phosphate
  modified_base 13: mod_base = OTHER; note = 2'-O-methyladenosine-3'-phosphate
  modified_base 14: mod_base = OTHER; note = 2'-deoxy-2'-fluorocytidine-3'-phosphate
  modified_base 15: mod_base = OTHER; note = 2'-O-methyluridine-3'-phosphate
  modified_base 16: mod_base = OTHER; note = 2'-deoxy-2'-fluoroadenosine-3'-phosphate
  modified_base 17: mod_base = OTHER; note = 2'-O-methyluridine-3'-phosphate
  modified_base 18: mod_base = OTHER; note = 2'-O-methylguanosine-3'-phosphate
  modified_base 19: mod_base = OTHER; note = 2'-O-methyladenosine-3'-phosphate
  modified_base 20: mod_base = OTHER; note = 2'-O-methyladenosine-3'-phosphate
  modified_base 21: mod_base = OTHER; note = 2'-O-methylcytidine-3'-phosphorothioate
  modified_base 22: mod_base = OTHER; note = 2'-O-methyluridine-3'-phosphorothioate
  modified_base 23: mod_base = OTHER; note = 2'-O-methyluridine
tcaattacagaaactatgaactt

SEQ ID NO: 332 - RNA, 23 nt, synthetic construct
  source 1..23: mol_type = other RNA
aagttcatagtttctgtaattgg

SEQ ID NO: 333 - RNA, 21 nt, synthetic construct
  source 1..21: mol_type = other RNA
  modified_base 1: mod_base = OTHER; note = 2'-O-methylcytidine-3'-phosphorothioate
  modified_base 2: mod_base = OTHER; note = 2'-O-methylguanosine-3'-phosphorothioate
  modified_base 3: mod_base = OTHER; note = 2'-O-methyluridine-3'-phosphate
  modified_base 4: mod_base = OTHER; note = 2'-O-methyluridine-3'-phosphate
  modified_base 5: mod_base = OTHER; note = 2'-O-methyladenosine-3'-phosphate
  modified_base 6: mod_base = OTHER; note = 2'-O-hexadecyl-cytidine-3'-phosphate
  modified_base 7: mod_base = OTHER; note = 2'-deoxy-2'-fluorouridine-3'-phosphate
  modified_base 8: mod_base = OTHER; note = 2'-O-methyladenosine-3'-phosphate
  modified_base 9: mod_base = OTHER; note = 2'-deoxy-2'-fluorouridine-3'-phosphate
  modified_base 10: mod_base = OTHER; note = 2'-deoxy-2'-fluorocytidine-3'-phosphate
  modified_base 11: mod_base = OTHER; note = 2'-deoxy-2'-fluoroguanosine-3'-phosphate
  modified_base 12: mod_base = OTHER; note = 2'-O-methyluridine-3'-phosphate
  modified_base 13: mod_base = OTHER; note = 2'-O-methylguanosine-3'-phosphate
  modified_base 14: mod_base = OTHER; note = 2'-O-methyladenosine-3'-phosphate
  modified_base 15: mod_base = OTHER; note = 2'-O-methyladenosine-3'-phosphate
  modified_base 16: mod_base = OTHER; note = 2'-O-methyladenosine-3'-phosphate
  modified_base 17: mod_base = OTHER; note = 2'-O-methyladenosine-3'-phosphate
  modified_base 18: mod_base = OTHER; note = 2'-O-methylcytidine-3'-phosphate
  modified_base 19: mod_base = OTHER; note = 2'-O-methyladenosine-3'-phosphorothioate
  modified_base 20: mod_base = OTHER; note = 2'-O-methyluridine-3'-phosphorothioate
  modified_base 21: mod_base = OTHER; note = 2'-O-methyladenosine
cgttactatcgtgaaaacata

SEQ ID NO: 334 - RNA, 23 nt, synthetic construct
  source 1..23: mol_type = other RNA
  modified_base 1: mod_base = OTHER; note = 2'-O-methyluridine-3'-phosphorothioate 5'-(E)-Vinylphosphonate
  modified_base 2: mod_base = OTHER; note = 2'-deoxy-2'-fluoroadenosine-3'-phosphorothioate
  modified_base 3: mod_base = OTHER; note = 2'-O-methyluridine-3'-phosphate
  modified_base 4: mod_base = OTHER; note = 2'-O-methylguanosine-3'-phosphate
  modified_base 5: mod_base = OTHER; note = 2'-O-methyluridine-3'-phosphate
  modified_base 6: mod_base = OTHER; note = 2'-deoxy-2'-fluorouridine-3'-phosphate
  modified_base 7: mod_base = OTHER; note = 2'-O-methyluridine-3'-phosphate
  modified_base 8: mod_base = OTHER; note = 2'-deoxy-2'-fluorouridine-3'-phosphate
  modified_base 9: mod_base = OTHER; note = 2'-deoxy-2'-fluorocytidine-3'-phosphate
  modified_base 10: mod_base = OTHER; note = 2'-O-methyladenosine-3'-phosphate
  modified_base 11: mod_base = OTHER; note = 2'-O-methylcytidine-3'-phosphate
  modified_base 12: mod_base = OTHER; note = 2'-O-methylguanosine-3'-phosphate
  modified_base 13: mod_base = OTHER; note = 2'-O-methyladenosine-3'-phosphate
  modified_base 14: mod_base = OTHER; note = 2'-deoxy-2'-fluorouridine-3'-phosphate
  modified_base 15: mod_base = OTHER; note = 2'-O-methyladenosine-3'-phosphate
  modified_base 16: mod_base = OTHER; note = 2'-deoxy-2'-fluoroguanosine-3'-phosphate
  modified_base 17: mod_base = OTHER; note = 2'-O-methyluridine-3'-phosphate
  modified_base 18: mod_base = OTHER; note = 2'-O-methyladenosine-3'-phosphate
  modified_base 19: mod_base = OTHER; note = 2'-O-methyladenosine-3'-phosphate
  modified_base 20: mod_base = OTHER; note = 2'-O-methylcytidine-3'-phosphate
  modified_base 21: mod_base = OTHER; note = 2'-O-methylguanosine-3'-phosphorothioate
  modified_base 22: mod_base = OTHER; note = 2'-O-methylguanosine-3'-phosphorothioate
  modified_base 23: mod_base = OTHER; note = 2'-O-methyluridine
tatgttttcacgatagtaacggt

SEQ ID NO: 335 - RNA, 23 nt, synthetic construct
  source 1..23: mol_type = other RNA
accgttactatcgtgaaaacatg

SEQ ID NO: 336 - RNA, 21 nt, synthetic construct
  source 1..21: mol_type = other RNA
  modified_base 1: mod_base = OTHER; note = 2'-O-methylguanosine-3'-phosphorothioate
  modified_base 2: mod_base = OTHER; note = 2'-O-methylcytidine-3'-phosphorothioate
  modified_base 3: mod_base = OTHER; note = 2'-O-methyladenosine-3'-phosphate
  modified_base 4: mod_base = OTHER; note = 2'-O-methylcytidine-3'-phosphate
  modified_base 5: mod_base = OTHER; note = 2'-O-methyluridine-3'-phosphate
  modified_base 6: mod_base = OTHER; note = 2'-O-hexadecyl-uridine-3'-phosphate
  modified_base 7: mod_base = OTHER; note = 2'-deoxy-2'-fluorouridine-3'-phosphate
  modified_base 8: mod_base = OTHER; note = 2'-O-methylguanosine-3'-phosphate
  modified_base 9: mod_base = OTHER; note = 2'-deoxy-2'-fluorouridine-3'-phosphate
  modified_base 10: mod_base = OTHER; note = 2'-deoxy-2'-fluoroguanosine-3'-phosphate
  modified_base 11: mod_base = OTHER; note = 2'-deoxy-2'-fluoroadenosine-3'-phosphate
  modified_base 12: mod_base = OTHER; note = 2'-O-methylguanosine-3'-phosphate
  modified_base 13: mod_base = OTHER; note = 2'-O-methyluridine-3'-phosphate
  modified_base 14: mod_base = OTHER; note = 2'-O-methyladenosine-3'-phosphate
  modified_base 15: mod_base = OTHER; note = 2'-O-methyluridine-3'-phosphate
  modified_base 16: mod_base = OTHER; note = 2'-O-methyluridine-3'-phosphate
  modified_base 17: mod_base = OTHER; note = 2'-O-methylcytidine-3'-phosphate
  modified_base 18: mod_base = OTHER; note = 2'-O-methyluridine-3'-phosphate
  modified_base 19: mod_base = OTHER; note = 2'-O-methyladenosine-3'-phosphorothioate
  modified_base 20: mod_base = OTHER; note = 2'-O-methyluridine-3'-phosphorothioate
  modified_base 21: mod_base = OTHER; note = 2'-O-methyladenosine
gcactttgtgagtattctata

SEQ ID NO: 337 - RNA, 23 nt, synthetic construct
  source 1..23: mol_type = other RNA
  modified_base 1: mod_base = OTHER; note = 2'-O-methyluridine-3'-phosphorothioate 5'-(E)-Vinylphosphonate
  modified_base 2: mod_base = OTHER; note = 2'-deoxy-2'-fluoroadenosine-3'-phosphorothioate
  modified_base 3: mod_base = OTHER; note = 2'-O-methyluridine-3'-phosphate
  modified_base 4: mod_base = OTHER; note = 2'-O-methyladenosine-3'-phosphate
  modified_base 5: mod_base = OTHER; note = 2'-O-methylguanosine-3'-phosphate
  modified_base 6: mod_base = OTHER; note = 2'-deoxy-2'-fluoroadenosine-3'-phosphate
  modified_base 7: mod_base = OTHER; note = 2'-O-methyladenosine-3'-phosphate
  modified_base 8: mod_base = OTHER; note = 2'-deoxy-2'-fluorouridine-3'-phosphate
  modified_base 9: mod_base = OTHER; note = 2'-deoxy-2'-fluoroadenosine-3'-phosphate
  modified_base 10: mod_base = OTHER; note = 2'-O-methylcytidine-3'-phosphate
  modified_base 11: mod_base = OTHER; note = 2'-O-methyluridine-3'-phosphate
  modified_base 12: mod_base = OTHER; note = 2'-O-methylcytidine-3'-phosphate
  modified_base 13: mod_base = OTHER; note = 2'-O-methyladenosine-3'-phosphate
  modified_base 14: mod_base = OTHER; note = 2'-deoxy-2'-fluorocytidine-3'-phosphate
  modified_base 15: mod_base = OTHER; note = 2'-O-methyladenosine-3'-phosphate
  modified_base 16: mod_base = OTHER; note = 2'-deoxy-2'-fluoroadenosine-3'-phosphate
  modified_base 17: mod_base = OTHER; note = 2'-O-methyladenosine-3'-phosphate
  modified_base 18: mod_base = OTHER; note = 2'-O-methylguanosine-3'-phosphate
  modified_base 19: mod_base = OTHER; note = 2'-O-methyluridine-3'-phosphate
  modified_base 20: mod_base = OTHER; note = 2'-O-methylguanosine-3'-phosphate
  modified_base 21: mod_base = OTHER; note = 2'-O-methylcytidine-3'-phosphorothioate
  modified_base 22: mod_base = OTHER; note = 2'-O-methyladenosine-3'-phosphorothioate
  modified_base 23: mod_base = OTHER; note = 2'-O-methyladenosine
tatagaatactcacaaagtgcaa

SEQ ID NO: 338 - RNA, 23 nt, synthetic construct
  source 1..23: mol_type = other RNA
ttgcactttgtgagtattctatg

SEQ ID NO: 339 - RNA, 21 nt, synthetic construct
  source 1..21: mol_type = other RNA
  modified_base 1: mod_base = OTHER; note = 2'-O-methyladenosine-3'-phosphorothioate
  modified_base 2: mod_base = OTHER; note = 2'-O-methyluridine-3'-phosphorothioate
  modified_base 3: mod_base = OTHER; note = 2'-O-methylcytidine-3'-phosphate
  modified_base 4: mod_base = OTHER; note = 2'-O-methyluridine-3'-phosphate
  modified_base 5: mod_base = OTHER; note = 2'-O-methylguanosine-3'-phosphate
  modified_base 6: mod_base = OTHER; note = 2'-O-hexadecyl-adenosine-3'-phosphate
  modified_base 7: mod_base = OTHER; note = 2'-deoxy-2'-fluoroadenosine-3'-phosphate
  modified_base 8: mod_base = OTHER; note = 2'-O-methylguanosine-3'-phosphate
  modified_base 9: mod_base = OTHER; note = 2'-deoxy-2'-fluorouridine-3'-phosphate
  modified_base 10: mod_base = OTHER; note = 2'-deoxy-2'-fluoroguanosine-3'-phosphate
  modified_base 11: mod_base = OTHER; note = 2'-deoxy-2'-fluorouridine-3'-phosphate
  modified_base 12: mod_base = OTHER; note = 2'-O-methylcytidine-3'-phosphate
  modified_base 13: mod_base = OTHER; note = 2'-O-methyluridine-3'-phosphate
  modified_base 14: mod_base = OTHER; note = 2'-O-methyladenosine-3'-phosphate
  modified_base 15: mod_base = OTHER; note = 2'-O-methyladenosine-3'-phosphate
  modified_base 16: mod_base = OTHER; note = 2'-O-methyluridine-3'-phosphate
  modified_base 17: mod_base = OTHER; note = 2'-O-methylguanosine-3'-phosphate
  modified_base 18: mod_base = OTHER; note = 2'-O-methylcytidine-3'-phosphate
  modified_base 19: mod_base = OTHER; note = 2'-O-methyladenosine-3'-phosphorothioate
  modified_base 20: mod_base = OTHER; note = 2'-O-methyluridine-3'-phosphorothioate
  modified_base 21: mod_base = OTHER; note = 2'-O-methyladenosine
atctgaagtgtctaatgcata

SEQ ID NO: 340 - RNA, 23 nt, synthetic construct
  source 1..23: mol_type = other RNA
  modified_base 1: mod_base = OTHER; note = 2'-O-methyluridine-3'-phosphorothioate 5'-(E)-Vinylphosphonate
  modified_base 2: mod_base = OTHER; note = 2'-deoxy-2'-fluoroadenosine-3'-phosphorothioate
  modified_base 3: mod_base = OTHER; note = 2'-O-methyluridine-3'-phosphate
  modified_base 4: mod_base = OTHER; note = 2'-O-methylguanosine-3'-phosphate
  modified_base 5: mod_base = OTHER; note = 2'-O-methylcytidine-3'-phosphate
  modified_base 6: mod_base = OTHER; note = 2'-deoxy-2'-fluoroadenosine-3'-phosphate
  modified_base 7: mod_base = OTHER; note = 2'-O-methyluridine-3'-phosphate
  modified_base 8: mod_base = OTHER; note = 2'-deoxy-2'-fluorouridine-3'-phosphate
  modified_base 9: mod_base = OTHER; note = 2'-deoxy-2'-fluoroadenosine-3'-phosphate
  modified_base 10: mod_base = OTHER; note = 2'-O-methylguanosine-3'-phosphate
  modified_base 11: mod_base = OTHER; note = 2'-O-methyladenosine-3'-phosphate
  modified_base 12: mod_base = OTHER; note = 2'-O-methylcytidine-3'-phosphate
  modified_base 13: mod_base = OTHER; note = 2'-O-methyladenosine-3'-phosphate
  modified_base 14: mod_base = OTHER; note = 2'-deoxy-2'-fluorocytidine-3'-phosphate
  modified_base 15: mod_base = OTHER; note = 2'-O-methyluridine-3'-phosphate
  modified_base 16: mod_base = OTHER; note = 2'-deoxy-2'-fluorouridine-3'-phosphate
  modified_base 17: mod_base = OTHER; note = 2'-O-methylcytidine-3'-phosphate
  modified_base 18: mod_base = OTHER; note = 2'-O-methyladenosine-3'-phosphate
  modified_base 19: mod_base = OTHER; note = 2'-O-methylguanosine-3'-phosphate
  modified_base 20: mod_base = OTHER; note = 2'-O-methyladenosine-3'-phosphate
  modified_base 21: mod_base = OTHER; note = 2'-O-methyluridine-3'-phosphorothioate
  modified_base 22: mod_base = OTHER; note = 2'-O-methylguanosine-3'-phosphorothioate
  modified_base 23: mod_base = OTHER; note = 2'-O-methyluridine
tatgcattagacacttcagatgt

SEQ ID NO: 341 - RNA, 23 nt, synthetic construct
  source 1..23: mol_type = other RNA
acatctgaagtgtctaatgcatt

SEQ ID NO: 342 - RNA, 21 nt, synthetic construct
  source 1..21: mol_type = other RNA
  modified_base 1: mod_base = OTHER; note = 2'-O-methyladenosine-3'-phosphorothioate
  modified_base 2: mod_base = OTHER; note = 2'-O-methylcytidine-3'-phosphorothioate
  modified_base 3: mod_base = OTHER; note = 2'-O-methyladenosine-3'-phosphate
  modified_base 4: mod_base = OTHER; note = 2'-O-methylguanosine-3'-phosphate
  modified_base 5: mod_base = OTHER; note = 2'-O-methyladenosine-3'-phosphate
  modified_base 6: mod_base = OTHER; note = 2'-O-hexadecyl-cytidine-3'-phosphate
  modified_base 7: mod_base = OTHER; note = 2'-deoxy-2'-fluorouridine-3'-phosphate
  modified_base 8: mod_base = OTHER; note = 2'-O-methyluridine-3'-phosphate
  modified_base 9: mod_base = OTHER; note = 2'-deoxy-2'-fluoroadenosine-3'-phosphate
  modified_base 10: mod_base = OTHER; note = 2'-deoxy-2'-fluoroguanosine-3'-phosphate
  modified_base 11: mod_base = OTHER; note = 2'-deoxy-2'-fluoroguanosine-3'-phosphate
  modified_base 12: mod_base = OTHER; note = 2'-O-methyladenosine-3'-phosphate
  modified_base 13: mod_base = OTHER; note = 2'-O-methylguanosine-3'-phosphate
  modified_base 14: mod_base = OTHER; note = 2'-O-methyluridine-3'-phosphate
  modified_base 15: mod_base = OTHER; note = 2'-O-methyluridine-3'-phosphate
  modified_base 16: mod_base = OTHER; note = 2'-O-methyluridine-3'-phosphate
  modified_base 17: mod_base = OTHER; note = 2'-O-methyluridine-3'-phosphate
  modified_base 18: mod_base = OTHER; note = 2'-O-methylguanosine-3'-phosphate
  modified_base 19: mod_base = OTHER; note = 2'-O-methyluridine-3'-phosphorothioate
  modified_base 20: mod_base = OTHER; note = 2'-O-methyluridine-3'-phosphorothioate
  modified_base 21: mod_base = OTHER; note = 2'-O-methyladenosine
acagacttaggagttttgtta

SEQ ID NO: 343 - RNA, 23 nt, synthetic construct
  source 1..23: mol_type = other RNA
  modified_base 1: mod_base = OTHER; note = 2'-O-methyluridine-3'-phosphorothioate 5'-(E)-Vinylphosphonate
  modified_base 2: mod_base = OTHER; note = 2'-deoxy-2'-fluoroadenosine-3'-phosphorothioate
  modified_base 3: mod_base = OTHER; note = 2'-O-methyladenosine-3'-phosphate
  modified_base 4: mod_base = OTHER; note = 2'-O-methylcytidine-3'-phosphate
  modified_base 5: mod_base = OTHER; note = 2'-O-methyladenosine-3'-phosphate
  modified_base 6: mod_base = OTHER; note = 2'-deoxy-2'-fluoroadenosine-3'-phosphate
  modified_base 7: mod_base = OTHER; note = 2'-O-methyladenosine-3'-phosphate
  modified_base 8: mod_base = OTHER; note = 2'-deoxy-2'-fluoroadenosine-3'-phosphate
  modified_base 9: mod_base = OTHER; note = 2'-deoxy-2'-fluorocytidine-3'-phosphate
  modified_base 10: mod_base = OTHER; note = 2'-O-methyluridine-3'-phosphate
  modified_base 11: mod_base = OTHER; note = 2'-O-methylcytidine-3'-phosphate
  modified_base 12: mod_base = OTHER; note = 2'-O-methylcytidine-3'-phosphate
  modified_base 13: mod_base = OTHER; note = 2'-O-methyluridine-3'-phosphate
  modified_base 14: mod_base = OTHER; note = 2'-deoxy-2'-fluoroadenosine-3'-phosphate
  modified_base 15: mod_base = OTHER; note = 2'-O-methyladenosine-3'-phosphate
  modified_base 16: mod_base = OTHER; note = 2'-deoxy-2'-fluoroguanosine-3'-phosphate
  modified_base 17: mod_base = OTHER; note = 2'-O-methyluridine-3'-phosphate
  modified_base 18: mod_base = OTHER; note = 2'-O-methylcytidine-3'-phosphate
  modified_base 19: mod_base = OTHER; note = 2'-O-methyluridine-3'-phosphate
  modified_base 20: mod_base = OTHER; note = 2'-O-methylguanosine-3'-phosphate
  modified_base 21: mod_base = OTHER; note = 2'-O-methyluridine-3'-phosphorothioate
  modified_base 22: mod_base = OTHER; note = 2'-O-methylcytidine-3'-phosphorothioate
  modified_base 23: mod_base = OTHER; note = 2'-O-methylcytidine
taacaaaactcctaagtctgtcc

SEQ ID NO: 344 - RNA, 23 nt, synthetic construct
  source 1..23: mol_type = other RNA
ggacagacttaggagttttgttt

SEQ ID NO: 345 - RNA, 21 nt, synthetic construct
  source 1..21: mol_type = other RNA
  modified_base 1: mod_base = OTHER; note = 2'-O-methyladenosine-3'-phosphorothioate
  modified_base 2: mod_base = OTHER; note = 2'-O-methyladenosine-3'-phosphorothioate
  modified_base 3: mod_base = OTHER; note = 2'-O-methylguanosine-3'-phosphate
  modified_base 4: mod_base = OTHER; note = 2'-O-methylguanosine-3'-phosphate
  modified_base 5: mod_base = OTHER; note = 2'-O-methyluridine-3'-phosphate
  modified_base 6: mod_base = OTHER; note = 2'-O-hexadecyl-adenosine-3'-phosphate
  modified_base 7: mod_base = OTHER; note = 2'-deoxy-2'-fluorocytidine-3'-phosphate
  modified_base 8: mod_base = OTHER; note = 2'-O-methyluridine-3'-phosphate
  modified_base 9: mod_base = OTHER; note = 2'-deoxy-2'-fluoroguanosine-3'-phosphate
  modified_base 10: mod_base = OTHER; note = 2'-deoxy-2'-fluoroadenosine-3'-phosphate
  modified_base 11: mod_base = OTHER; note = 2'-deoxy-2'-fluoroadenosine-3'-phosphate
  modified_base 12: mod_base = OTHER; note = 2'-O-methyluridine-3'-phosphate
  modified_base 13: mod_base = OTHER; note = 2'-O-methyladenosine-3'-phosphate
  modified_base 14: mod_base = OTHER; note = 2'-O-methylcytidine-3'-phosphate
  modified_base 15: mod_base = OTHER; note = 2'-O-methyluridine-3'-phosphate
  modified_base 16: mod_base = OTHER; note = 2'-O-methyluridine-3'-phosphate
  modified_base 17: mod_base = OTHER; note = 2'-O-methyladenosine-3'-phosphate
  modified_base 18: mod_base = OTHER; note = 2'-O-methyladenosine-3'-phosphate
  modified_base 19: mod_base = OTHER; note = 2'-O-methyluridine-3'-phosphorothioate
  modified_base 20: mod_base = OTHER; note = 2'-O-methyladenosine-3'-phosphorothioate
  modified_base 21: mod_base = OTHER; note = 2'-O-methyladenosine
aaggtactgaatacttaataa

SEQ ID NO: 346 - RNA, 23 nt, synthetic construct
  source 1..23: mol_type = other RNA
  modified_base 1: mod_base = OTHER; note = 2'-O-methyluridine-3'-phosphorothioate 5'-(E)-Vinylphosphonate
  modified_base 2: mod_base = OTHER; note = 2'-deoxy-2'-fluorouridine-3'-phosphorothioate
  modified_base 3: mod_base = OTHER; note = 2'-O-methyladenosine-3'-phosphate
  modified_base 4: mod_base = OTHER; note = 2'-O-methyluridine-3'-phosphate
  modified_base 5: mod_base = OTHER; note = 2'-O-methyluridine-3'-phosphate
  modified_base 6: mod_base = OTHER; note = 2'-deoxy-2'-fluoroadenosine-3'-phosphate
  modified_base 7: mod_base = OTHER; note = 2'-O-methyladenosine-3'-phosphate
  modified_base 8: mod_base = OTHER; note = 2'-deoxy-2'-fluoroguanosine-3'-phosphate
  modified_base 9: mod_base = OTHER; note = 2'-deoxy-2'-fluorouridine-3'-phosphate
  modified_base 10: mod_base = OTHER; note = 2'-O-methyladenosine-3'-phosphate
  modified_base 11: mod_base = OTHER; note = 2'-O-methyluridine-3'-phosphate
  modified_base 12: mod_base = OTHER; note = 2'-O-methyluridine-3'-phosphate
  modified_base 13: mod_base = OTHER; note = 2'-O-methylcytidine-3'-phosphate
  modified_base 14: mod_base = OTHER; note = 2'-deoxy-2'-fluoroadenosine-3'-phosphate
  modified_base 15: mod_base = OTHER; note = 2'-O-methylguanosine-3'-phosphate
  modified_base 16: mod_base = OTHER; note = 2'-deoxy-2'-fluorouridine-3'-phosphate
  modified_base 17: mod_base = OTHER; note = 2'-O-methyladenosine-3'-phosphate
  modified_base 18: mod_base = OTHER; note = 2'-O-methylcytidine-3'-phosphate
  modified_base 19: mod_base = OTHER; note = 2'-O-methylcytidine-3'-phosphate
  modified_base 20: mod_base = OTHER; note = 2'-O-methyluridine-3'-phosphate
  modified_base 21: mod_base = OTHER; note = 2'-O-methyluridine-3'-phosphorothioate
  modified_base 22: mod_base = OTHER; note = 2'-O-methyladenosine-3'-phosphorothioate
  modified_base 23: mod_base = OTHER; note = 2'-O-methylcytidine
ttattaagtattcagtaccttac

SEQ ID NO: 347 - RNA, 23 nt, synthetic construct
  source 1..23: mol_type = other RNA
gtaaggtactgaatacttaatat

SEQ ID NO: 348 - RNA, 21 nt, synthetic construct
  source 1..21: mol_type = other RNA
  modified_base 1: mod_base = OTHER; note = 2'-O-methyladenosine-3'-phosphorothioate
  modified_base 2: mod_base = OTHER; note = 2'-O-methylguanosine-3'-phosphorothioate
  modified_base 3: mod_base = OTHER; note = 2'-O-methylguanosine-3'-phosphate
  modified_base 4: mod_base = OTHER; note = 2'-O-methyladenosine-3'-phosphate
  modified_base 5: mod_base = OTHER; note = 2'-O-methylcytidine-3'-phosphate
  modified_base 6: mod_base = OTHER; note = 2'-O-hexadecyl-cytidine-3'-phosphate
  modified_base 7: mod_base = OTHER; note = 2'-deoxy-2'-fluoroguanosine-3'-phosphate
  modified_base 8: mod_base = OTHER; note = 2'-O-methyluridine-3'-phosphate
  modified_base 9: mod_base = OTHER; note = 2'-deoxy-2'-fluorouridine-3'-phosphate
  modified_base 10: mod_base = OTHER; note = 2'-deoxy-2'-fluoroadenosine-3'-phosphate
  modified_base 11: mod_base = OTHER; note = 2'-deoxy-2'-fluorocytidine-3'-phosphate
  modified_base 12: mod_base = OTHER; note = 2'-O-methyluridine-3'-phosphate
  modified_base 13: mod_base = OTHER; note = 2'-O-methyladenosine-3'-phosphate
  modified_base 14: mod_base = OTHER; note = 2'-O-methyluridine-3'-phosphate
  modified_base 15: mod_base = OTHER; note = 2'-O-methylcytidine-3'-phosphate
  modified_base 16: mod_base = OTHER; note = 2'-O-methylguanosine-3'-phosphate
  modified_base 17: mod_base = OTHER; note = 2'-O-methyluridine-3'-phosphate
  modified_base 18: mod_base = OTHER; note = 2'-O-methylguanosine-3'-phosphate
  modified_base 19: mod_base = OTHER; note = 2'-O-methyladenosine-3'-phosphorothioate
  modified_base 20: mod_base = OTHER; note = 2'-O-methyladenosine-3'-phosphorothioate
  modified_base 21: mod_base = OTHER; note = 2'-O-methyladenosine
aggaccgttactatcgtgaaa

SEQ ID NO: 349 - RNA, 23 nt, synthetic construct
  source 1..23: mol_type = other RNA
  modified_base 1: mod_base = OTHER; note = 2'-O-methyluridine-3'-phosphorothioate 5'-(E)-Vinylphosphonate
  modified_base 2: mod_base = OTHER; note = 2'-deoxy-2'-fluorouridine-3'-phosphorothioate
  modified_base 3: mod_base = OTHER; note = 2'-O-methyluridine-3'-phosphate
  modified_base 4: mod_base = OTHER; note = 2'-O-methylcytidine-3'-phosphate
  modified_base 5: mod_base = OTHER; note = 2'-O-methyladenosine-3'-phosphate
  modified_base 6: mod_base = OTHER; note = 2'-deoxy-2'-fluorocytidine-3'-phosphate
  modified_base 7: mod_base = OTHER; note = 2'-O-methylguanosine-3'-phosphate
  modified_base 8: mod_base = OTHER; note = 2'-deoxy-2'-fluoroadenosine-3'-phosphate
  modified_base 9: mod_base = OTHER; note = 2'-deoxy-2'-fluorouridine-3'-phosphate
  modified_base 10: mod_base = OTHER; note = 2'-O-methyladenosine-3'-phosphate
  modified_base 11: mod_base = OTHER; note = 2'-O-methylguanosine-3'-phosphate
  modified_base 12: mod_base = OTHER; note = 2'-O-methyluridine-3'-phosphate
  modified_base 13: mod_base = OTHER; note = 2'-O-methyladenosine-3'-phosphate
  modified_base 14: mod_base = OTHER; note = 2'-deoxy-2'-fluoroadenosine-3'-phosphate
  modified_base 15: mod_base = OTHER; note = 2'-O-methylcytidine-3'-phosphate
  modified_base 16: mod_base = OTHER; note = 2'-deoxy-2'-fluoroguanosine-3'-phosphate
  modified_base 17: mod_base = OTHER; note = 2'-O-methylguanosine-3'-phosphate
  modified_base 18: mod_base = OTHER; note = 2'-O-methyluridine-3'-phosphate
  modified_base 19: mod_base = OTHER; note = 2'-O-methylcytidine-3'-phosphate
  modified_base 20: mod_base = OTHER; note = 2'-O-methylcytidine-3'-phosphate
  modified_base 21: mod_base = OTHER; note = 2'-O-methyluridine-3'-phosphorothioate
  modified_base 22: mod_base = OTHER; note = 2'-O-methylcytidine-3'-phosphorothioate
  modified_base 23: mod_base = OTHER; note = 2'-O-methyladenosine
tttcacgatagtaacggtcctca

SEQ ID NO: 350 - RNA, 23 nt, synthetic construct
  source 1..23: mol_type = other RNA
tgaggaccgttactatcgtgaaa

SEQ ID NO: 351 - RNA, 21 nt, synthetic construct
  source 1..21: mol_type = other RNA
  modified_base 1: mod_base = OTHER; note = 2'-O-methylcytidine-3'-phosphorothioate
  modified_base 2: mod_base = OTHER; note = 2'-O-methyladenosine-3'-phosphorothioate
  modified_base 3: mod_base = OTHER; note = 2'-O-methyladenosine-3'-phosphate
  modified_base 4: mod_base = OTHER; note = 2'-O-methyluridine-3'-phosphate
  modified_base 5: mod_base = OTHER; note = 2'-O-methylguanosine-3'-phosphate
  modified_base 6: mod_base = OTHER; note = 2'-O-hexadecyl-uridine-3'-phosphate
  modified_base 7: mod_base = OTHER; note = 2'-deoxy-2'-fluoroguanosine-3'-phosphate
  modified_base 8: mod_base = OTHER; note = 2'-O-methylcytidine-3'-phosphate
  modified_base 9: mod_base = OTHER; note = 2'-deoxy-2'-fluoroadenosine-3'-phosphate
  modified_base 10: mod_base = OTHER; note = 2'-deoxy-2'-fluorocytidine-3'-phosphate
  modified_base 11: mod_base = OTHER; note = 2'-deoxy-2'-fluorouridine-3'-phosphate
  modified_base 12: mod_base = OTHER; note = 2'-O-methylguanosine-3'-phosphate
  modified_base 13: mod_base = OTHER; note = 2'-O-methyladenosine-3'-phosphate
  modified_base 14: mod_base = OTHER; note = 2'-O-methyladenosine-3'-phosphate
  modified_base 15: mod_base = OTHER; note = 2'-O-methyluridine-3'-phosphate
  modified_base 16: mod_base = OTHER; note = 2'-O-methylcytidine-3'-phosphate
  modified_base 17: mod_base = OTHER; note = 2'-O-methylguanosine-3'-phosphate
  modified_base 18: mod_base = OTHER; note = 2'-O-methyluridine-3'-phosphate
  modified_base 19: mod_base = OTHER; note = 2'-O-methyluridine-3'-phosphorothioate
  modified_base 20: mod_base = OTHER; note = 2'-O-methyluridine-3'-phosphorothioate
  modified_base 21: mod_base = OTHER; note = 2'-O-methyladenosine
caatgtgcactgaatcgttta

SEQ ID NO: 352 - RNA, 23 nt, synthetic construct
  source 1..23: mol_type = other RNA
  modified_base 1: mod_base = OTHER; note = 2'-O-methyluridine-3'-phosphorothioate 5'-(E)-Vinylphosphonate
  modified_base 2: mod_base = OTHER; note = 2'-deoxy-2'-fluoroadenosine-3'-phosphorothioate
  modified_base 3: mod_base = OTHER; note = 2'-O-methyladenosine-3'-phosphate
  modified_base 4: mod_base = OTHER; note = 2'-O-methyladenosine-3'-phosphate
  modified_base 5: mod_base = OTHER; note = 2'-O-methylcytidine-3'-phosphate
  modified_base 6: mod_base = OTHER; note = 2'-deoxy-2'-fluoroguanosine-3'-phosphate
  modified_base 7: mod_base = OTHER; note = 2'-O-methyladenosine-3'-phosphate
  modified_base 8: mod_base = OTHER; note = 2'-deoxy-2'-fluorouridine-3'-phosphate
  modified_base 9: mod_base = OTHER; note = 2'-deoxy-2'-fluorouridine-3'-phosphate
  modified_base 10: mod_base = OTHER; note = 2'-O-methylcytidine-3'-phosphate
  modified_base 11: mod_base = OTHER; note = 2'-O-methyladenosine-3'-phosphate
  modified_base 12: mod_base = OTHER; note = 2'-O-methylguanosine-3'-phosphate
  modified_base 13: mod_base = OTHER; note = 2'-O-methyluridine-3'-phosphate
  modified_base 14: mod_base = OTHER; note = 2'-deoxy-2'-fluoroguanosine-3'-phosphate
  modified_base 15: mod_base = OTHER; note = 2'-O-methylcytidine-3'-phosphate
  modified_base 16: mod_base = OTHER; note = 2'-deoxy-2'-fluoroadenosine-3'-phosphate
  modified_base 17: mod_base = OTHER; note = 2'-O-methylcytidine-3'-phosphate
  modified_base 18: mod_base = OTHER; note = 2'-O-methyladenosine-3'-phosphate
  modified_base 19: mod_base = OTHER; note = 2'-O-methyluridine-3'-phosphate
  modified_base 20: mod_base = OTHER; note = 2'-O-methyluridine-3'-phosphate
  modified_base 21: mod_base = OTHER; note = 2'-O-methylguanosine-3'-phosphorothioate
  modified_base 22: mod_base = OTHER; note = 2'-O-methyluridine-3'-phosphorothioate
  modified_base 23: mod_base = OTHER; note = 2'-O-methyladenosine
taaacgattcagtgcacattgta

SEQ ID NO: 353 - RNA, 23 nt, synthetic construct
  source 1..23: mol_type = other RNA
tacaatgtgcactgaatcgtttc

SEQ ID NO: 354 - RNA, 21 nt, synthetic construct
  source 1..21: mol_type = other RNA
  modified_base 1: mod_base = OTHER; note = 2'-O-methyluridine-3'-phosphorothioate
  modified_base 2: mod_base = OTHER; note = 2'-O-methylcytidine-3'-phosphorothioate
  modified_base 3: mod_base = OTHER; note = 2'-O-methylcytidine-3'-phosphate
  modified_base 4: mod_base = OTHER; note = 2'-O-methyluridine-3'-phosphate
  modified_base 5: mod_base = OTHER; note = 2'-O-methyluridine-3'-phosphate
  modified_base 6: mod_base = OTHER; note = 2'-O-hexadecyl-uridine-3'-phosphate
  modified_base 7: mod_base = OTHER; note = 2'-deoxy-2'-fluoroguanosine-3'-phosphate
  modified_base 8: mod_base = OTHER; note = 2'-O-methyluridine-3'-phosphate
  modified_base 9: mod_base = OTHER; note = 2'-deoxy-2'-fluorocytidine-3'-phosphate
  modified_base 10: mod_base = OTHER; note = 2'-deoxy-2'-fluorocytidine-3'-phosphate
  modified_base 11: mod_base = OTHER; note = 2'-deoxy-2'-fluoroadenosine-3'-phosphate
  modified_base 12: mod_base = OTHER; note = 2'-O-methyluridine-3'-phosphate
  modified_base 13: mod_base = OTHER; note = 2'-O-methyluridine-3'-phosphate
  modified_base 14: mod_base = OTHER; note = 2'-O-methyluridine-3'-phosphate
  modified_base 15: mod_base = OTHER; note = 2'-O-methyladenosine-3'-phosphate
  modified_base 16: mod_base = OTHER; note = 2'-O-methylcytidine-3'-phosphate
  modified_base 17: mod_base = OTHER; note = 2'-O-methylcytidine-3'-phosphate
  modified_base 18: mod_base = OTHER; note = 2'-O-methyluridine-3'-phosphate
  modified_base 19: mod_base = OTHER; note = 2'-O-methylguanosine-3'-phosphorothioate
  modified_base 20: mod_base = OTHER; note = 2'-O-methylguanosine-3'-phosphorothioate
  modified_base 21: mod_base = OTHER; note = 2'-O-methyladenosine
tcctttgtccatttacctgga

SEQ ID NO: 355 - RNA, 23 nt, synthetic construct
  source 1..23: mol_type = other RNA
  modified_base 1: mod_base = OTHER; note = 2'-O-methyluridine-3'-phosphorothioate 5'-(E)-Vinylphosphonate
  modified_base 2: mod_base = OTHER; note = 2'-deoxy-2'-fluorocytidine-3'-phosphorothioate
  modified_base 3: mod_base = OTHER; note = 2'-O-methylcytidine-3'-phosphate
  modified_base 4: mod_base = OTHER; note = 2'-O-methyladenosine-3'-phosphate
  modified_base 5: mod_base = OTHER; note = 2'-O-methylguanosine-3'-phosphate
  modified_base 6: mod_base = OTHER; note = 2'-deoxy-2'-fluoroguanosine-3'-phosphate
  modified_base 7: mod_base = OTHER; note = 2'-O-methyluridine-3'-phosphate
  modified_base 8: mod_base = OTHER; note = 2'-deoxy-2'-fluoroadenosine-3'-phosphate
  modified_base 9: mod_base = OTHER; note = 2'-deoxy-2'-fluoroadenosine-3'-phosphate
  modified_base 10: mod_base = OTHER; note = 2'-O-methyladenosine-3'-phosphate
  modified_base 11: mod_base = OTHER; note = 2'-O-methyluridine-3'-phosphate
  modified_base 12: mod_base = OTHER; note = 2'-O-methylguanosine-3'-phosphate
  modified_base 13: mod_base = OTHER; note = 2'-O-methylguanosine-3'-phosphate
  modified_base 14: mod_base = OTHER; note = 2'-deoxy-2'-fluoroadenosine-3'-phosphate
  modified_base 15: mod_base = OTHER; note = 2'-O-methylcytidine-3'-phosphate
  modified_base 16: mod_base = OTHER; note = 2'-deoxy-2'-fluoroadenosine-3'-phosphate
  modified_base 17: mod_base = OTHER; note = 2'-O-methyladenosine-3'-phosphate
  modified_base 18: mod_base = OTHER; note = 2'-O-methyladenosine-3'-phosphate
  modified_base 19: mod_base = OTHER; note = 2'-O-methylguanosine-3'-phosphate
  modified_base 20: mod_base = OTHER; note = 2'-O-methylguanosine-3'-phosphate
  modified_base 21: mod_base = OTHER; note = 2'-O-methyladenosine-3'-phosphorothioate
  modified_base 22: mod_base = OTHER; note = 2'-O-methylguanosine-3'-phosphorothioate
  modified_base 23: mod_base = OTHER; note = 2'-O-methyladenosine
tccaggtaaatggacaaaggaga

SEQ ID NO: 356 - RNA, 23 nt, synthetic construct
  source 1..23: mol_type = other RNA
tctcctttgtccatttacctgga

SEQ ID NO: 357 - RNA, 21 nt, synthetic construct
  source 1..21: mol_type = other RNA
  modified_base 1: mod_base = OTHER; note = 2'-O-methyladenosine-3'-phosphorothioate
  modified_base 2: mod_base = OTHER; note = 2'-O-methyladenosine-3'-phosphorothioate
  modified_base 3: mod_base = OTHER; note = 2'-O-methylguanosine-3'-phosphate
  modified_base 4: mod_base = OTHER; note = 2'-O-methyluridine-3'-phosphate
  modified_base 5: mod_base = OTHER; note = 2'-O-methylguanosine-3'-phosphate
  modified_base 6: mod_base = OTHER; note = 2'-O-hexadecyl-uridine-3'-phosphate
  modified_base 7: mod_base = OTHER; note = 2'-deoxy-2'-fluorocytidine-3'-phosphate
  modified_base 8: mod_base = OTHER; note = 2'-O-methyluridine-3'-phosphate
  modified_base 9: mod_base = OTHER; note = 2'-deoxy-2'-fluoroadenosine-3'-phosphate
  modified_base 10: mod_base = OTHER; note = 2'-deoxy-2'-fluoroadenosine-3'-phosphate
  modified_base 11: mod_base = OTHER; note = 2'-deoxy-2'-fluorouridine-3'-phosphate
  modified_base 12: mod_base = OTHER; note = 2'-O-methylguanosine-3'-phosphate
  modified_base 13: mod_base = OTHER; note = 2'-O-methylcytidine-3'-phosphate
  modified_base 14: mod_base = OTHER; note = 2'-O-methyladenosine-3'-phosphate
  modified_base 15: mod_base = OTHER; note = 2'-O-methyluridine-3'-phosphate
  modified_base 16: mod_base = OTHER; note = 2'-O-methyluridine-3'-phosphate
  modified_base 17: mod_base = OTHER; note = 2'-O-methyladenosine-3'-phosphate
  modified_base 18: mod_base = OTHER; note = 2'-O-methyladenosine-3'-phosphate
  modified_base 19: mod_base = OTHER; note = 2'-O-methylcytidine-3'-phosphorothioate
  modified_base 20: mod_base = OTHER; note = 2'-O-methyluridine-3'-phosphorothioate
  modified_base 21: mod_base = OTHER; note = 2'-O-methyladenosine
aagtgtctaatgcattaacta

SEQ ID NO: 358 - RNA, 23 nt, synthetic construct
  source 1..23: mol_type = other RNA
  modified_base 1: mod_base = OTHER; note = 2'-O-methyluridine-3'-phosphorothioate 5'-(E)-Vinylphosphonate
  modified_base 2: mod_base = OTHER; note = 2'-deoxy-2'-fluoroadenosine-3'-phosphorothioate
  modified_base 3: mod_base = OTHER; note = 2'-O-methylguanosine-3'-phosphate
  modified_base 4: mod_base = OTHER; note = 2'-O-methyluridine-3'-phosphate
  modified_base 5: mod_base = OTHER; note = 2'-O-methyluridine-3'-phosphate
  modified_base 6: mod_base = OTHER; note = 2'-deoxy-2'-fluoroadenosine-3'-phosphate
  modified_base 7: mod_base = OTHER; note = 2'-O-methyladenosine-3'-phosphate
  modified_base 8: mod_base = OTHER; note = 2'-deoxy-2'-fluorouridine-3'-phosphate
  modified_base 9: mod_base = OTHER; note = 2'-deoxy-2'-fluoroguanosine-3'-phosphate
  modified_base 10: mod_base = OTHER; note = 2'-O-methylcytidine-3'-phosphate
  modified_base 11: mod_base = OTHER; note = 2'-O-methyladenosine-3'-phosphate
  modified_base 12: mod_base = OTHER; note = 2'-O-methyluridine-3'-phosphate
  modified_base 13: mod_base = OTHER; note = 2'-O-methyluridine-3'-phosphate
  modified_base 14: mod_base = OTHER; note = 2'-deoxy-2'-fluoroadenosine-3'-phosphate
  modified_base 15: mod_base = OTHER; note = 2'-O-methylguanosine-3'-phosphate
  modified_base 16: mod_base = OTHER; note = 2'-deoxy-2'-fluoroadenosine-3'-phosphate
  modified_base 17: mod_base = OTHER; note = 2'-O-methylcytidine-3'-phosphate
  modified_base 18: mod_base = OTHER; note = 2'-O-methyladenosine-3'-phosphate
  modified_base 19: mod_base = OTHER; note = 2'-O-methylcytidine-3'-phosphate
  modified_base 20: mod_base = OTHER; note = 2'-O-methyluridine-3'-phosphate
  modified_base 21: mod_base = OTHER; note = 2'-O-methyluridine-3'-phosphorothioate
  modified_base 22: mod_base = OTHER; note = 2'-O-methylcytidine-3'-phosphorothioate
  modified_base 23: mod_base = OTHER; note = 2'-O-methyladenosine
tagttaatgcattagacacttca

SEQ ID NO: 359 - RNA, 23 nt, synthetic construct
  source 1..23: mol_type = other RNA
tgaagtgtctaatgcattaactt

SEQ ID NO: 360 - RNA, 21 nt, synthetic construct
  source 1..21: mol_type = other RNA
  modified_base 1: mod_base = OTHER; note = 2'-O-methyladenosine-3'-phosphorothioate
  modified_base 2: mod_base = OTHER; note = 2'-O-methyluridine-3'-phosphorothioate
  modified_base 3: mod_base = OTHER; note = 2'-O-methylcytidine-3'-phosphate
  modified_base 4: mod_base = OTHER; note = 2'-O-methyluridine-3'-phosphate
  modified_base 5: mod_base = OTHER; note = 2'-O-methyluridine-3'-phosphate
  modified_base 6: mod_base = OTHER; note = 2'-O-hexadecyl-adenosine-3'-phosphate
  modified_base 7: mod_base = OTHER; note = 2'-deoxy-2'-fluoroguanosine-3'-phosphate
  modified_base 8: mod_base = OTHER; note = 2'-O-methyluridine-3'-phosphate
  modified_base 9: mod_base = OTHER; note = 2'-deoxy-2'-fluoroadenosine-3'-phosphate
  modified_base 10: mod_base = OTHER; note = 2'-deoxy-2'-fluoroguanosine-3'-phosphate
  modified_base 11: mod_base = OTHER; note = 2'-deoxy-2'-fluoroadenosine-3'-phosphate
  modified_base 12: mod_base = OTHER; note = 2'-O-methylguanosine-3'-phosphate
  modified_base 13: mod_base = OTHER; note = 2'-O-methyladenosine-3'-phosphate
  modified_base 14: mod_base = OTHER; note = 2'-O-methyluridine-3'-phosphate
  modified_base 15: mod_base = OTHER; note = 2'-O-methyluridine-3'-phosphate
  modified_base 16: mod_base = OTHER; note = 2'-O-methyluridine-3'-phosphate
  modified_base 17: mod_base = OTHER; note = 2'-O-methylcytidine-3'-phosphate
  modified_base 18: mod_base = OTHER; note = 2'-O-methyladenosine-3'-phosphate
  modified_base 19: mod_base = OTHER; note = 2'-O-methyluridine-3'-phosphorothioate
  modified_base 20: mod_base = OTHER; note = 2'-O-methyladenosine-3'-phosphorothioate
  modified_base 21: mod_base = OTHER; note = 2'-O-methyladenosine
atcttagtagagatttcataa

SEQ ID NO: 361 - RNA, 23 nt, synthetic construct
  source 1..23: mol_type = other RNA
  modified_base 1: mod_base = OTHER; note = 2'-O-methyluridine-3'-phosphorothioate 5'-(E)-Vinylphosphonate
  modified_base 2: mod_base = OTHER; note = 2'-deoxy-2'-fluorouridine-3'-phosphorothioate
  modified_base 3: mod_base = OTHER; note = 2'-O-methyladenosine-3'-phosphate
  modified_base 4: mod_base = OTHER; note = 2'-O-methyluridine-3'-phosphate
  modified_base 5: mod_base = OTHER; note = 2'-O-methylguanosine-3'-phosphate
  modified_base 6: mod_base = OTHER; note = 2'-deoxy-2'-fluoroadenosine-3'-phosphate
  modified_base 7: mod_base = OTHER; note = 2'-O-methyladenosine-3'-phosphate
  modified_base 8: mod_base = OTHER; note = 2'-deoxy-2'-fluoroadenosine-3'-phosphate
  modified_base 9: mod_base = OTHER; note = 2'-deoxy-2'-fluorouridine-3'-phosphate
  modified_base 10: mod_base = OTHER; note = 2'-O-methylcytidine-3'-phosphate
  modified_base 11: mod_base = OTHER; note = 2'-O-methyluridine-3'-phosphate
  modified_base 12: mod_base = OTHER; note = 2'-O-methylcytidine-3'-phosphate
  modified_base 13: mod_base = OTHER; note = 2'-O-methyluridine-3'-phosphate
  modified_base 14: mod_base = OTHER; note = 2'-deoxy-2'-fluoroadenosine-3'-phosphate
  modified_base 15: mod_base = OTHER; note = 2'-O-methylcytidine-3'-phosphate
  modified_base 16: mod_base = OTHER; note = 2'-deoxy-2'-fluorouridine-3'-phosphate
  modified_base 17: mod_base = OTHER; note = 2'-O-methyladenosine-3'-phosphate
  modified_base 18: mod_base = OTHER; note = 2'-O-methyladenosine-3'-phosphate
  modified_base 19: mod_base = OTHER; note = 2'-O-methylguanosine-3'-phosphate
  modified_base 20: mod_base = OTHER; note = 2'-O-methyladenosine-3'-phosphate
  modified_base 21: mod_base = OTHER; note = 2'-O-methyluridine-3'-phosphorothioate
  modified_base 22: mod_base = OTHER; note = 2'-O-methyladenosine-3'-phosphorothioate
  modified_base 23: mod_base = OTHER; note = 2'-O-methylguanosine
ttatgaaatctctactaagatag

SEQ ID NO: 362 - RNA, 23 nt, synthetic construct
  source 1..23: mol_type = other RNA
ctatcttagtagagatttcatag

SEQ ID NO: 363 - RNA, 21 nt, synthetic construct
  source 1..21: mol_type = other RNA
  modified_base 1: mod_base = OTHER; note = 2'-O-methylguanosine-3'-phosphorothioate
  modified_base 2: mod_base = OTHER; note = 2'-O-methyluridine-3'-phosphorothioate
  modified_base 3: mod_base = OTHER; note = 2'-O-methylguanosine-3'-phosphate
  modified_base 4: mod_base = OTHER; note = 2'-O-methylguanosine-3'-phosphate
  modified_base 5: mod_base = OTHER; note = 2'-O-methylguanosine-3'-phosphate
  modified_base 6: mod_base = OTHER; note = 2'-O-hexadecyl-adenosine-3'-phosphate
  modified_base 7: mod_base = OTHER; note = 2'-deoxy-2'-fluoroadenosine-3'-phosphate
  modified_base 8: mod_base = OTHER; note = 2'-O-methyladenosine-3'-phosphate
  modified_base 9: mod_base = OTHER; note = 2'-deoxy-2'-fluorocytidine-3'-phosphate
  modified_base 10: mod_base = OTHER; note = 2'-deoxy-2'-fluorocytidine-3'-phosphate
  modified_base 11: mod_base = OTHER; note = 2'-deoxy-2'-fluorocytidine-3'-phosphate
  modified_base 12: mod_base = OTHER; note = 2'-O-methyluridine-3'-phosphate
  modified_base 13: mod_base = OTHER; note = 2'-O-methyluridine-3'-phosphate
  modified_base 14: mod_base = OTHER; note = 2'-O-methyluridine-3'-phosphate
  modified_base 15: mod_base = OTHER; note = 2'-O-methyluridine-3'-phosphate
  modified_base 16: mod_base = OTHER; note = 2'-O-methylguanosine-3'-phosphate
  modified_base 17: mod_base = OTHER; note = 2'-O-methylcytidine-3'-phosphate
  modified_base 18: mod_base = OTHER; note = 2'-O-methylguanosine-3'-phosphate
  modified_base 19: mod_base = OTHER; note = 2'-O-methyluridine-3'-phosphorothioate
  modified_base 20: mod_base = OTHER; note = 2'-O-methylguanosine-3'-phosphorothioate
  modified_base 21: mod_base = OTHER; note = 2'-O-methyladenosine
gtgggaaacccttttgcgtga

SEQ ID NO: 364 - RNA, 23 nt, synthetic construct
  source 1..23: mol_type = other RNA
  modified_base 1: mod_base = OTHER; note = 2'-O-methyluridine-3'-phosphorothioate 5'-(E)-Vinylphosphonate
  modified_base 2: mod_base = OTHER; note = 2'-deoxy-2'-fluorocytidine-3'-phosphorothioate
  modified_base 3: mod_base = OTHER; note = 2'-O-methyladenosine-3'-phosphate
  modified_base 4: mod_base = OTHER; note = 2'-O-methylcytidine-3'-phosphate
  modified_base 5: mod_base = OTHER; note = 2'-O-methylguanosine-3'-phosphate
  modified_base 6: mod_base = OTHER; note = 2'-deoxy-2'-fluorocytidine-3'-phosphate
  modified_base 7: mod_base = OTHER; note = 2'-O-methyladenosine-3'-phosphate
  modified_base 8: mod_base = OTHER; note = 2'-deoxy-2'-fluoroadenosine-3'-phosphate
  modified_base 9: mod_base = OTHER; note = 2'-deoxy-2'-fluoroadenosine-3'-phosphate
  modified_base 10: mod_base = OTHER; note = 2'-O-methyladenosine-3'-phosphate
  modified_base 11: mod_base = OTHER; note = 2'-O-methylguanosine-3'-phosphate
  modified_base 12: mod_base = OTHER; note = 2'-O-methylguanosine-3'-phosphate
  modified_base 13: mod_base = OTHER; note = 2'-O-methylguanosine-3'-phosphate
  modified_base 14: mod_base = OTHER; note = 2'-deoxy-2'-fluorouridine-3'-phosphate
  modified_base 15: mod_base = OTHER; note = 2'-O-methyluridine-3'-phosphate
  modified_base 16: mod_base = OTHER; note = 2'-deoxy-2'-fluorouridine-3'-phosphate
  modified_base 17: mod_base = OTHER; note = 2'-O-methylcytidine-3'-phosphate
  modified_base 18: mod_base = OTHER; note = 2'-O-methylcytidine-3'-phosphate
  modified_base 19: mod_base = OTHER; note = 2'-O-methylcytidine-3'-phosphate
  modified_base 20: mod_base = OTHER; note = 2'-O-methyladenosine-3'-phosphate
  modified_base 21: mod_base = OTHER; note = 2'-O-methylcytidine-3'-phosphorothioate
  modified_base 22: mod_base = OTHER; note = 2'-O-methyladenosine-3'-phosphorothioate
  modified_base 23: mod_base = OTHER; note = 2'-O-methyluridine
tcacgcaaaagggtttcccacat

SEQ ID NO: 365 - RNA, 23 nt, synthetic construct
  source 1..23: mol_type = other RNA
atgtgggaaacccttttgcgtgg

SEQ ID NO: 366 - RNA, 21 nt, synthetic construct
  source 1..21: mol_type = other RNA
  modified_base 1: mod_base = OTHER; note = 2'-O-methylguanosine-3'-phosphorothioate
  modified_base 2: mod_base = OTHER; note = 2'-O-methylcytidine-3'-phosphorothioate
  modified_base 3: mod_base = OTHER; note = 2'-O-methyladenosine-3'-phosphate
  modified_base 4: mod_base = OTHER; note = 2'-O-methyluridine-3'-phosphate
  modified_base 5: mod_base = OTHER; note = 2'-O-methyluridine-3'-phosphate
  modified_base 6: mod_base = OTHER; note = 2'-O-hexadecyl-cytidine-3'-phosphate
  modified_base 7: mod_base = OTHER; note = 2'-deoxy-2'-fluorocytidine-3'-phosphate
  modified_base 8: mod_base = OTHER; note = 2'-O-methyluridine-3'-phosphate
  modified_base 9: mod_base = OTHER; note = 2'-deoxy-2'-fluorouridine-3'-phosphate
  modified_base 10: mod_base = OTHER; note = 2'-deoxy-2'-fluorouridine-3'-phosphate
  modified_base 11: mod_base = OTHER; note = 2'-deoxy-2'-fluorocytidine-3'-phosphate
  modified_base 12: mod_base = OTHER; note = 2'-O-methyluridine-3'-phosphate
  modified_base 13: mod_base = OTHER; note = 2'-O-methyluridine-3'-phosphate
  modified_base 14: mod_base = OTHER; note = 2'-O-methyluridine-3'-phosphate
  modified_base 15: mod_base = OTHER; note = 2'-O-methyladenosine-3'-phosphate
  modified_base 16: mod_base = OTHER; note = 2'-O-methyladenosine-3'-phosphate
  modified_base 17: mod_base = OTHER; note = 2'-O-methyladenosine-3'-phosphate
  modified_base 18: mod_base = OTHER; note = 2'-O-methylcytidine-3'-phosphate
  modified_base 19: mod_base = OTHER; note = 2'-O-methyluridine-3'-phosphorothioate
  modified_base 20: mod_base = OTHER; note = 2'-O-methyladenosine-3'-phosphorothioate
  modified_base 21: mod_base = OTHER; note = 2'-O-methyladenosine
gcattcctttctttaaactaa

SEQ ID NO: 367 - RNA, 23 nt, synthetic construct
  source 1..23: mol_type = other RNA
  modified_base 1: mod_base = OTHER; note = 2'-O-methyluridine-3'-phosphorothioate 5'-(E)-Vinylphosphonate
  modified_base 2: mod_base = OTHER; note = 2'-deoxy-2'-fluorouridine-3'-phosphorothioate
  modified_base 3: mod_base = OTHER; note = 2'-O-methyladenosine-3'-phosphate
  modified_base 4: mod_base = OTHER; note = 2'-O-methylguanosine-3'-phosphate
  modified_base 5: mod_base = OTHER; note = 2'-O-methyluridine-3'-phosphate
  modified_base 6: mod_base = OTHER; note = 2'-deoxy-2'-fluorouridine-3'-phosphate
  modified_base 7: mod_base = OTHER; note = 2'-O-methyluridine-3'-phosphate
  modified_base 8: mod_base = OTHER; note = 2'-deoxy-2'-fluoroadenosine-3'-phosphate
  modified_base 9: mod_base = OTHER; note = 2'-deoxy-2'-fluoroadenosine-3'-phosphate
  modified_base 10: mod_base = OTHER; note = 2'-O-methyladenosine-3'-phosphate
  modified_base 11: mod_base = OTHER; note = 2'-O-methylguanosine-3'-phosphate
  modified_base 12: mod_base = OTHER; note = 2'-O-methyladenosine-3'-phosphate
  modified_base 13: mod_base = OTHER; note = 2'-O-methyladenosine-3'-phosphate
  modified_base 14: mod_base = OTHER; note = 2'-deoxy-2'-fluoroadenosine-3'-phosphate
  modified_base 15: mod_base = OTHER; note = 2'-O-methylguanosine-3'-phosphate
  modified_base 16: mod_base = OTHER; note = 2'-deoxy-2'-fluoroguanosine-3'-phosphate
  modified_base 17: mod_base = OTHER; note = 2'-O-methyladenosine-3'-phosphate
  modified_base 18: mod_base = OTHER; note = 2'-O-methyladenosine-3'-phosphate
  modified_base 19: mod_base = OTHER; note = 2'-O-methyluridine-3'-phosphate
  modified_base 20: mod_base = OTHER; note = 2'-O-methylguanosine-3'-phosphate
  modified_base 21: mod_base = OTHER; note = 2'-O-methylcytidine-3'-phosphorothioate
  modified_base 22: mod_base = OTHER; note = 2'-O-methylcytidine-3'-phosphorothioate
  modified_base 23: mod_base = OTHER; note = 2'-O-methyladenosine
ttagtttaaagaaaggaatgcca

SEQ ID NO: 368 - RNA, 23 nt, synthetic construct
  source 1..23: mol_type = other RNA
tggcattcctttctttaaactat

SEQ ID NO: 369 - RNA, 21 nt, synthetic construct
  source 1..21: mol_type = other RNA
  modified_base 1: mod_base = OTHER; note = 2'-O-methylcytidine-3'-phosphorothioate
  modified_base 2: mod_base = OTHER; note = 2'-O-methyluridine-3'-phosphorothioate
  modified_base 3: mod_base = OTHER; note = 2'-O-methylcytidine-3'-phosphate
  modified_base 4: mod_base = OTHER; note = 2'-O-methylcytidine-3'-phosphate
  modified_base 5: mod_base = OTHER; note = 2'-O-methyluridine-3'-phosphate
  modified_base 6: mod_base = OTHER; note = 2'-O-hexadecyl-uridine-3'-phosphate
  modified_base 7: mod_base = OTHER; note = 2'-deoxy-2'-fluorouridine-3'-phosphate
  modified_base 8: mod_base = OTHER; note = 2'-O-methylguanosine-3'-phosphate
  modified_base 9: mod_base = OTHER; note = 2'-deoxy-2'-fluorouridine-3'-phosphate
  modified_base 10: mod_base = OTHER; note = 2'-deoxy-2'-fluorocytidine-3'-phosphate
  modified_base 11: mod_base = OTHER; note = 2'-deoxy-2'-fluorocytidine-3'-phosphate
  modified_base 12: mod_base = OTHER; note = 2'-O-methyladenosine-3'-phosphate
  modified_base 13: mod_base = OTHER; note = 2'-O-methyluridine-3'-phosphate
  modified_base 14: mod_base = OTHER; note = 2'-O-methyluridine-3'-phosphate
  modified_base 15: mod_base = OTHER; note = 2'-O-methyluridine-3'-phosphate
  modified_base 16: mod_base = OTHER; note = 2'-O-methyladenosine-3'-phosphate
  modified_base 17: mod_base = OTHER; note = 2'-O-methylcytidine-3'-phosphate
  modified_base 18: mod_base = OTHER; note = 2'-O-methylcytidine-3'-phosphate
  modified_base 19: mod_base = OTHER; note = 2'-O-methyluridine-3'-phosphorothioate
  modified_base 20: mod_base = OTHER; note = 2'-O-methylguanosine-3'-phosphorothioate
  modified_base 21: mod_base = OTHER; note = 2'-O-methyladenosine
ctcctttgtccatttacctga

SEQ ID NO: 370 - RNA, 23 nt, synthetic construct
  source 1..23: mol_type = other RNA
  modified_base 1: mod_base = OTHER; note = 2'-O-methyluridine-3'-phosphorothioate 5'-(E)-Vinylphosphonate
  modified_base 2: mod_base = OTHER; note = 2'-deoxy-2'-fluorocytidine-3'-phosphorothioate
  modified_base 3: mod_base = OTHER; note = 2'-O-methyladenosine-3'-phosphate
  modified_base 4: mod_base = OTHER; note = 2'-O-methylguanosine-3'-phosphate
  modified_base 5: mod_base = OTHER; note = 2'-O-methylguanosine-3'-phosphate
  modified_base 6: mod_base = OTHER; note = 2'-deoxy-2'-fluorouridine-3'-phosphate
  modified_base 7: mod_base = OTHER; note = 2'-O-methyladenosine-3'-phosphate
  modified_base 8: mod_base = OTHER; note = 2'-deoxy-2'-fluoroadenosine-3'-phosphate
  modified_base 9: mod_base = OTHER; note = 2'-deoxy-2'-fluoroadenosine-3'-phosphate
  modified_base 10: mod_base = OTHER; note = 2'-O-methyluridine-3'-phosphate
  modified_base 11: mod_base = OTHER; note = 2'-O-methylguanosine-3'-phosphate
  modified_base 12: mod_base = OTHER; note = 2'-O-methylguanosine-3'-phosphate
  modified_base 13: mod_base = OTHER; note = 2'-O-methyladenosine-3'-phosphate
  modified_base 14: mod_base = OTHER; note = 2'-deoxy-2'-fluorocytidine-3'-phosphate
  modified_base 15: mod_base = OTHER; note = 2'-O-methyladenosine-3'-phosphate
  modified_base 16: mod_base = OTHER; note = 2'-deoxy-2'-fluoroadenosine-3'-phosphate
  modified_base 17: mod_base = OTHER; note = 2'-O-methyladenosine-3'-phosphate
  modified_base 18: mod_base = OTHER; note = 2'-O-methylguanosine-3'-phosphate
  modified_base 19: mod_base = OTHER; note = 2'-O-methylguanosine-3'-phosphate
  modified_base 20: mod_base = OTHER; note = 2'-O-methyladenosine-3'-phosphate
  modified_base 21: mod_base = OTHER; note = 2'-O-methylguanosine-3'-phosphorothioate
  modified_base 22: mod_base = OTHER; note = 2'-O-methyladenosine-3'-phosphorothioate
  modified_base 23: mod_base = OTHER; note = 2'-O-methyluridine
tcaggtaaatggacaaaggagat

SEQ ID NO: 371 - RNA, 23 nt, synthetic construct
  source 1..23: mol_type = other RNA
atctcctttgtccatttacctgg

SEQ ID NO: 372 - RNA, 21 nt, synthetic construct
  source 1..21: mol_type = other RNA
  modified_base 1: mod_base = OTHER; note = 2'-O-methyluridine-3'-phosphorothioate
  modified_base 2: mod_base = OTHER; note = 2'-O-methyluridine-3'-phosphorothioate
  modified_base 3: mod_base = OTHER; note = 2'-O-methylcytidine-3'-phosphate
  modified_base 4: mod_base = OTHER; note = 2'-O-methyladenosine-3'-phosphate
  modified_base 5: mod_base = OTHER; note = 2'-O-methyladenosine-3'-phosphate
  modified_base 6: mod_base = OTHER; note = 2'-O-hexadecyl-cytidine-3'-phosphate
  modified_base 7: mod_base = OTHER; note = 2'-deoxy-2'-fluoroadenosine-3'-phosphate
  modified_base 8: mod_base = OTHER; note = 2'-O-methyladenosine-3'-phosphate
  modified_base 9: mod_base = OTHER; note = 2'-deoxy-2'-fluoroguanosine-3'-phosphate
  modified_base 10: mod_base = OTHER; note = 2'-deoxy-2'-fluoroadenosine-3'-phosphate
  modified_base 11: mod_base = OTHER; note = 2'-deoxy-2'-fluoroguanosine-3'-phosphate
  modified_base 12: mod_base = OTHER; note = 2'-O-methyluridine-3'-phosphate
  modified_base 13: mod_base = OTHER; note = 2'-O-methyladenosine-3'-phosphate
  modified_base 14: mod_base = OTHER; note = 2'-O-methyladenosine-3'-phosphate
  modified_base 15: mod_base = OTHER; note = 2'-O-methyladenosine-3'-phosphate
  modified_base 16: mod_base = OTHER; note = 2'-O-methyluridine-3'-phosphate
  modified_base 17: mod_base = OTHER; note = 2'-O-methyladenosine-3'-phosphate
  modified_base 18: mod_base = OTHER; note = 2'-O-methyluridine-3'-phosphate
  modified_base 19: mod_base = OTHER; note = 2'-O-methyluridine-3'-phosphorothioate
  modified_base 20: mod_base = OTHER; note = 2'-O-methylguanosine-3'-phosphorothioate
  modified_base 21: mod_base = OTHER; note = 2'-O-methyladenosine
ttcaacaagagtaaatattga

SEQ ID NO: 373 - RNA, 23 nt, synthetic construct
  source 1..23: mol_type = other RNA
  modified_base 1: mod_base = OTHER; note = 2'-O-methyluridine-3'-phosphorothioate 5'-(E)-Vinylphosphonate
  modified_base 2: mod_base = OTHER; note = 2'-deoxy-2'-fluorocytidine-3'-phosphorothioate
  modified_base 3: mod_base = OTHER; note = 2'-O-methyladenosine-3'-phosphate
  modified_base 4: mod_base = OTHER; note = 2'-O-methyladenosine-3'-phosphate
  modified_base 5: mod_base = OTHER; note = 2'-O-methyluridine-3'-phosphate
  modified_base 6: mod_base = OTHER; note = 2'-deoxy-2'-fluoroadenosine-3'-phosphate
  modified_base 7: mod_base = OTHER; note = 2'-O-methyluridine-3'-phosphate
  modified_base 8: mod_base = OTHER; note = 2'-deoxy-2'-fluorouridine-3'-phosphate
  modified_base 9: mod_base = OTHER; note = 2'-deoxy-2'-fluorouridine-3'-phosphate
  modified_base 10: mod_base = OTHER; note = 2'-O-methyladenosine-3'-phosphate
  modified_base 11: mod_base = OTHER; note = 2'-O-methylcytidine-3'-phosphate
  modified_base 12: mod_base = OTHER; note = 2'-O-methyluridine-3'-phosphate
  modified_base 13: mod_base = OTHER; note = 2'-O-methylcytidine-3'-phosphate
  modified_base 14: mod_base = OTHER; note = 2'-deoxy-2'-fluorouridine-3'-phosphate
  modified_base 15: mod_base = OTHER; note = 2'-O-methyluridine-3'-phosphate
  modified_base 16: mod_base = OTHER; note = 2'-deoxy-2'-fluoroguanosine-3'-phosphate
  modified_base 17: mod_base = OTHER; note = 2'-O-methyluridine-3'-phosphate
  modified_base 18: mod_base = OTHER; note = 2'-O-methyluridine-3'-phosphate
  modified_base 19: mod_base = OTHER; note = 2'-O-methylguanosine-3'-phosphate
  modified_base 20: mod_base = OTHER; note = 2'-O-methyladenosine-3'-phosphate
  modified_base 21: mod_base = OTHER; note = 2'-O-methyladenosine-3'-phosphorothioate
  modified_base 22: mod_base = OTHER; note = 2'-O-methylcytidine-3'-phosphorothioate
  modified_base 23: mod_base = OTHER; note = 2'-O-methyladenosine
tcaatatttactcttgttgaaca

SEQ ID NO: 374 - RNA, 23 nt, synthetic construct
  source 1..23: mol_type = other RNA
tgttcaacaagagtaaatattgt

SEQ ID NO: 375 - RNA, 21 nt, synthetic construct
  source 1..21: mol_type = other RNA
  modified_base 1: mod_base = OTHER; note = 2'-O-methylguanosine-3'-phosphorothioate
  modified_base 2: mod_base = OTHER; note = 2'-O-methyluridine-3'-phosphorothioate
  modified_base 3: mod_base = OTHER; note = 2'-O-methyluridine-3'-phosphate
  modified_base 4: mod_base = OTHER; note = 2'-O-methyladenosine-3'-phosphate
  modified_base 5: mod_base = OTHER; note = 2'-O-methylcytidine-3'-phosphate
  modified_base 6: mod_base = OTHER; note = 2'-O-hexadecyl-uridine-3'-phosphate
  modified_base 7: mod_base = OTHER; note = 2'-deoxy-2'-fluoroadenosine-3'-phosphate
  modified_base 8: mod_base = OTHER; note = 2'-O-methyluridine-3'-phosphate
  modified_base 9: mod_base = OTHER; note = 2'-deoxy-2'-fluorocytidine-3'-phosphate
  modified_base 10: mod_base = OTHER; note = 2'-deoxy-2'-fluoroguanosine-3'-phosphate
  modified_base 11: mod_base = OTHER; note = 2'-deoxy-2'-fluorouridine-3'-phosphate
  modified_base 12: mod_base = OTHER; note = 2'-O-methylguanosine-3'-phosphate
  modified_base 13: mod_base = OTHER; note = 2'-O-methyladenosine-3'-phosphate
  modified_base 14: mod_base = OTHER; note = 2'-O-methyladenosine-3'-phosphate
  modified_base 15: mod_base = OTHER; note = 2'-O-methyladenosine-3'-phosphate
  modified_base 16: mod_base = OTHER; note = 2'-O-methyladenosine-3'-phosphate
  modified_base 17: mod_base = OTHER; note = 2'-O-methylcytidine-3'-phosphate
  modified_base 18: mod_base = OTHER; note = 2'-O-methyladenosine-3'-phosphate
  modified_base 19: mod_base = OTHER; note = 2'-O-methyluridine-3'-phosphorothioate
  modified_base 20: mod_base = OTHER; note = 2'-O-methylguanosine-3'-phosphorothioate
  modified_base 21: mod_base = OTHER; note = 2'-O-methyladenosine
gttactatcgtgaaaacatga

SEQ ID NO: 376 - RNA, 23 nt, synthetic construct
  source 1..23: mol_type = other RNA
  modified_base 1: mod_base = OTHER; note = 2'-O-methyluridine-3'-phosphorothioate 5'-(E)-Vinylphosphonate
  modified_base 2: mod_base = OTHER; note = 2'-deoxy-2'-fluorocytidine-3'-phosphorothioate
  modified_base 3: mod_base = OTHER; note = 2'-O-methyladenosine-3'-phosphate
  modified_base 4: mod_base = OTHER; note = 2'-O-methyluridine-3'-phosphate
  modified_base 5: mod_base = OTHER; note = 2'-O-methylguanosine-3'-phosphate
  modified_base 6: mod_base = OTHER; note = 2'-deoxy-2'-fluorouridine-3'-phosphate
  modified_base 7: mod_base = OTHER; note = 2'-O-methyluridine-3'-phosphate
  modified_base 8: mod_base = OTHER; note = 2'-deoxy-2'-fluorouridine-3'-phosphate
  modified_base 9: mod_base = OTHER; note = 2'-deoxy-2'-fluorouridine-3'-phosphate
  modified_base 10: mod_base = OTHER; note = 2'-O-methylcytidine-3'-phosphate
  modified_base 11: mod_base = OTHER; note = 2'-O-methyladenosine-3'-phosphate
  modified_base 12: mod_base = OTHER; note = 2'-O-methylcytidine-3'-phosphate
  modified_base 13: mod_base = OTHER; note = 2'-O-methylguanosine-3'-phosphate
  modified_base 14: mod_base = OTHER; note = 2'-deoxy-2'-fluoroadenosine-3'-phosphate
  modified_base 15: mod_base = OTHER; note = 2'-O-methyluridine-3'-phosphate
  modified_base 16: mod_base = OTHER; note = 2'-deoxy-2'-fluoroadenosine-3'-phosphate
  modified_base 17: mod_base = OTHER; note = 2'-O-methylguanosine-3'-phosphate
  modified_base 18: mod_base = OTHER; note = 2'-O-methyluridine-3'-phosphate
  modified_base 19: mod_base = OTHER; note = 2'-O-methyladenosine-3'-phosphate
  modified_base 20: mod_base = OTHER; note = 2'-O-methyladenosine-3'-phosphate
  modified_base 21: mod_base = OTHER; note = 2'-O-methylcytidine-3'-phosphorothioate
  modified_base 22: mod_base = OTHER; note = 2'-O-methylguanosine-3'-phosphorothioate
  modified_base 23: mod_base = OTHER; note = 2'-O-methylguanosine
tcatgttttcacgatagtaacgg

SEQ ID NO: 377 - RNA, 23 nt, synthetic construct
  source 1..23: mol_type = other RNA
ccgttactatcgtgaaaacatgc

SEQ ID NO: 378 - RNA, 21 nt, synthetic construct
  source 1..21: mol_type = other RNA
  modified_base 1: mod_base = OTHER; note = 2'-O-methyluridine-3'-phosphorothioate
  modified_base 2: mod_base = OTHER; note = 2'-O-methylguanosine-3'-phosphorothioate
  modified_base 3: mod_base = OTHER; note = 2'-O-methylcytidine-3'-phosphate
  modified_base 4: mod_base = OTHER; note = 2'-O-methylguanosine-3'-phosphate
  modified_base 5: mod_base = OTHER; note = 2'-O-methyluridine-3'-phosphate
  modified_base 6: mod_base = OTHER; note = 2'-O-hexadecyl-cytidine-3'-phosphate
  modified_base 7: mod_base = OTHER; note = 2'-deoxy-2'-fluoroadenosine-3'-phosphate
  modified_base 8: mod_base = OTHER; note = 2'-O-methyladenosine-3'-phosphate
  modified_base 9: mod_base = OTHER; note = 2'-deoxy-2'-fluorouridine-3'-phosphate
  modified_base 10: mod_base = OTHER; note = 2'-deoxy-2'-fluoroadenosine-3'-phosphate
  modified_base 11: mod_base = OTHER; note = 2'-deoxy-2'-fluorouridine-3'-phosphate
  modified_base 12: mod_base = OTHER; note = 2'-O-methylcytidine-3'-phosphate
  modified_base 13: mod_base = OTHER; note = 2'-O-methyladenosine-3'-phosphate
  modified_base 14: mod_base = OTHER; note = 2'-O-methylcytidine-3'-phosphate
  modified_base 15: mod_base = OTHER; note = 2'-O-methyladenosine-3'-phosphate
  modified_base 16: mod_base = OTHER; note = 2'-O-methyladenosine-3'-phosphate
  modified_base 17: mod_base = OTHER; note = 2'-O-methyluridine-3'-phosphate
  modified_base 18: mod_base = OTHER; note = 2'-O-methylcytidine-3'-phosphate
  modified_base 19: mod_base = OTHER; note = 2'-O-methyladenosine-3'-phosphorothioate
  modified_base 20: mod_base = OTHER; note = 2'-O-methyladenosine-3'-phosphorothioate
  modified_base 21: mod_base = OTHER; note = 2'-O-methyladenosine
tgcgtcaatatcacaatcaaa

SEQ ID NO: 379 - RNA, 23 nt, synthetic construct
  source 1..23: mol_type = other RNA
  modified_base 1: mod_base = OTHER; note = 2'-O-methyluridine-3'-phosphorothioate 5'-(E)-Vinylphosphonate
  modified_base 2: mod_base = OTHER; note = 2'-deoxy-2'-fluorouridine-3'-phosphorothioate
  modified_base 3: mod_base = OTHER; note = 2'-O-methyluridine-3'-phosphate
  modified_base 4: mod_base = OTHER; note = 2'-O-methylguanosine-3'-phosphate
  modified_base 5: mod_base = OTHER; note = 2'-O-methyladenosine-3'-phosphate
  modified_base 6: mod_base = OTHER; note = 2'-deoxy-2'-fluorouridine-3'-phosphate
  modified_base 7: mod_base = OTHER; note = 2'-O-methyluridine-3'-phosphate
  modified_base 8: mod_base = OTHER; note = 2'-deoxy-2'-fluoroguanosine-3'-phosphate
  modified_base 9: mod_base = OTHER; note = 2'-deoxy-2'-fluorouridine-3'-phosphate
  modified_base 10: mod_base = OTHER; note = 2'-O-methylguanosine-3'-phosphate
  modified_base 11: mod_base = OTHER; note = 2'-O-methyladenosine-3'-phosphate
  modified_base 12: mod_base = OTHER; note = 2'-O-methyluridine-3'-phosphate
  modified_base 13: mod_base = OTHER; note = 2'-O-methyladenosine-3'-phosphate
  modified_base 14: mod_base = OTHER; note = 2'-deoxy-2'-fluorouridine-3'-phosphate
  modified_base 15: mod_base = OTHER; note = 2'-O-methyluridine-3'-phosphate
  modified_base 16: mod_base = OTHER; note = 2'-deoxy-2'-fluoroguanosine-3'-phosphate
  modified_base 17: mod_base = OTHER; note = 2'-O-methyladenosine-3'-phosphate
  modified_base 18: mod_base = OTHER; note = 2'-O-methylcytidine-3'-phosphate
  modified_base 19: mod_base = OTHER; note = 2'-O-methylguanosine-3'-phosphate
  modified_base 20: mod_base = OTHER; note = 2'-O-methylcytidine-3'-phosphate
  modified_base 21: mod_base = OTHER; note = 2'-O-methyladenosine-3'-phosphorothioate
  modified_base 22: mod_base = OTHER; note = 2'-O-methylguanosine-3'-phosphorothioate
  modified_base 23: mod_base = OTHER; note = 2'-O-methyluridine
tttgattgtgatattgacgcagt

SEQ ID NO: 380 - RNA, 23 nt, synthetic construct
  source 1..23: mol_type = other RNA
actgcgtcaatatcacaatcaag

SEQ ID NO: 381 - RNA, 21 nt, synthetic construct
  source 1..21: mol_type = other RNA
  modified_base 1: mod_base = OTHER; note = 2'-O-methyluridine-3'-phosphorothioate
  modified_base 2: mod_base = OTHER; note = 2'-O-methylcytidine-3'-phosphorothioate
  modified_base 3: mod_base = OTHER; note = 2'-O-methylcytidine-3'-phosphate
  modified_base 4: mod_base = OTHER; note = 2'-O-methyluridine-3'-phosphate
  modified_base 5: mod_base = OTHER; note = 2'-O-methyluridine-3'-phosphate
  modified_base 6: mod_base = OTHER; note = 2'-O-hexadecyl-adenosine-3'-phosphate
  modified_base 7: mod_base = OTHER; note = 2'-deoxy-2'-fluoroguanosine-3'-phosphate
  modified_base 8: mod_base = OTHER; note = 2'-O-methylguanosine-3'-phosphate
  modified_base 9: mod_base = OTHER; note = 2'-deoxy-2'-fluorocytidine-3'-phosphate
  modified_base 10: mod_base = OTHER; note = 2'-deoxy-2'-fluorouridine-3'-phosphate
  modified_base 11: mod_base = OTHER; note = 2'-deoxy-2'-fluorouridine-3'-phosphate
  modified_base 12: mod_base = OTHER; note = 2'-O-methyladenosine-3'-phosphate
  modified_base 13: mod_base = OTHER; note = 2'-O-methylcytidine-3'-phosphate
  modified_base 14: mod_base = OTHER; note = 2'-O-methyladenosine-3'-phosphate
  modified_base 15: mod_base = OTHER; note = 2'-O-methyladenosine-3'-phosphate
  modified_base 16: mod_base = OTHER; note = 2'-O-methyluridine-3'-phosphate
  modified_base 17: mod_base = OTHER; note = 2'-O-methylguanosine-3'-phosphate
  modified_base 18: mod_base = OTHER; note = 2'-O-methyluridine-3'-phosphate
  modified_base 19: mod_base = OTHER; note = 2'-O-methylguanosine-3'-phosphorothioate
  modified_base 20: mod_base = OTHER; note = 2'-O-methylcytidine-3'-phosphorothioate
  modified_base 21: mod_base = OTHER; note = 2'-O-methyladenosine
tccttaggcttacaatgtgca

SEQ ID NO: 382 - RNA, 23 nt, synthetic construct
  source 1..23: mol_type = other RNA
  modified_base 1: mod_base = OTHER; note = 2'-O-methyluridine-3'-phosphorothioate 5'-(E)-Vinylphosphonate
  modified_base 2: mod_base = OTHER; note = 2'-deoxy-2'-fluoroguanosine-3'-phosphorothioate
  modified_base 3: mod_base = OTHER; note = 2'-O-methylcytidine-3'-phosphate
  modified_base 4: mod_base = OTHER; note = 2'-O-methyladenosine-3'-phosphate
  modified_base 5: mod_base = OTHER; note = 2'-O-methylcytidine-3'-phosphate
  modified_base 6: mod_base = OTHER; note = 2'-deoxy-2'-fluoroadenosine-3'-phosphate
  modified_base 7: mod_base = OTHER; note = 2'-O-methyluridine-3'-phosphate
  modified_base 8: mod_base = OTHER; note = 2'-deoxy-2'-fluorouridine-3'-phosphate
  modified_base 9: mod_base = OTHER; note = 2'-deoxy-2'-fluoroguanosine-3'-phosphate
  modified_base 10: mod_base = OTHER; note = 2'-O-methyluridine-3'-phosphate
  modified_base 11: mod_base = OTHER; note = 2'-O-methyladenosine-3'-phosphate
  modified_base 12: mod_base = OTHER; note = 2'-O-methyladenosine-3'-phosphate
  modified_base 13: mod_base = OTHER; note = 2'-O-methylguanosine-3'-phosphate
  modified_base 14: mod_base = OTHER; note = 2'-deoxy-2'-fluorocytidine-3'-phosphate
  modified_base 15: mod_base = OTHER; note = 2'-O-methylcytidine-3'-phosphate
  modified_base 16: mod_base = OTHER; note = 2'-deoxy-2'-fluorouridine-3'-phosphate
  modified_base 17: mod_base = OTHER; note = 2'-O-methyladenosine-3'-phosphate
  modified_base 18: mod_base = OTHER; note = 2'-O-methyladenosine-3'-phosphate
  modified_base 19: mod_base = OTHER; note = 2'-O-methylguanosine-3'-phosphate
  modified_base 20: mod_base = OTHER; note = 2'-O-methylguanosine-3'-phosphate
  modified_base 21: mod_base = OTHER; note = 2'-O-methyladenosine-3'-phosphorothioate
  modified_base 22: mod_base = OTHER; note = 2'-O-methylcytidine-3'-phosphorothioate
  modified_base 23: mod_base = OTHER; note = 2'-O-methylcytidine
tgcacattgtaagcctaaggacc

SEQ ID NO: 383 - RNA, 23 nt, synthetic construct
  source 1..23: mol_type = other RNA
ggtccttaggcttacaatgtgca

SEQ ID NO: 384 - RNA, 21 nt, synthetic construct
  source 1..21: mol_type = other RNA
  modified_base 1: mod_base = OTHER; note = 2'-O-methylcytidine-3'-phosphorothioate
  modified_base 2: mod_base = OTHER; note = 2'-O-methyluridine-3'-phosphorothioate
  modified_base 3: mod_base = OTHER; note = 2'-O-methyluridine-3'-phosphate
  modified_base 4: mod_base = OTHER; note = 2'-O-methylcytidine-3'-phosphate
  modified_base 5: mod_base = OTHER; note = 2'-O-methyluridine-3'-phosphate
  modified_base 6: mod_base = OTHER; note = 2'-O-hexadecyl-guanosine-3'-phosphate
  modified_base 7: mod_base = OTHER; note = 2'-deoxy-2'-fluoroguanosine-3'-phosphate
  modified_base 8: mod_base = OTHER; note = 2'-O-methylguanosine-3'-phosphate
  modified_base 9: mod_base = OTHER; note = 2'-deoxy-2'-fluoroadenosine-3'-phosphate
  modified_base 10: mod_base = OTHER; note = 2'-deoxy-2'-fluorocytidine-3'-phosphate
  modified_base 11: mod_base = OTHER; note = 2'-deoxy-2'-fluorouridine-3'-phosphate
  modified_base 12: mod_base = OTHER; note = 2'-O-methyluridine-3'-phosphate
  modified_base 13: mod_base = OTHER; note = 2'-O-methylguanosine-3'-phosphate
  modified_base 14: mod_base = OTHER; note = 2'-O-methyladenosine-3'-phosphate
  modified_base 15: mod_base = OTHER; note = 2'-O-methyladenosine-3'-phosphate
  modified_base 16: mod_base = OTHER; note = 2'-O-methyladenosine-3'-phosphate
  modified_base 17: mod_base = OTHER; note = 2'-O-methyluridine-3'-phosphate
  modified_base 18: mod_base = OTHER; note = 2'-O-methylcytidine-3'-phosphate
  modified_base 19: mod_base = OTHER; note = 2'-O-methyladenosine-3'-phosphorothioate
  modified_base 20: mod_base = OTHER; note = 2'-O-methyladenosine-3'-phosphorothioate
  modified_base 21: mod_base = OTHER; note = 2'-O-methyladenosine
cttctgggacttgaaatcaaa

SEQ ID NO: 385 - RNA, 23 nt, synthetic construct
  source 1..23: mol_type = other RNA
  modified_base 1: mod_base = OTHER; note = 2'-O-methyluridine-3'-phosphorothioate 5'-(E)-Vinylphosphonate
  modified_base 2: mod_base = OTHER; note = 2'-deoxy-2'-fluorouridine-3'-phosphorothioate
  modified_base 3: mod_base = OTHER; note = 2'-O-methyluridine-3'-phosphate
  modified_base 4: mod_base = OTHER; note = 2'-O-methylguanosine-3'-phosphate
  modified_base 5: mod_base = OTHER; note = 2'-O-methyladenosine-3'-phosphate
  modified_base 6: mod_base = OTHER; note = 2'-deoxy-2'-fluorouridine-3'-phosphate
  modified_base 7: mod_base = OTHER; note = 2'-O-methyluridine-3'-phosphate
  modified_base 8: mod_base = OTHER; note = 2'-deoxy-2'-fluorouridine-3'-phosphate
  modified_base 9: mod_base = OTHER; note = 2'-deoxy-2'-fluorocytidine-3'-phosphate
  modified_base 10: mod_base = OTHER; note = 2'-O-methyladenosine-3'-phosphate
  modified_base 11: mod_base = OTHER; note = 2'-O-methyladenosine-3'-phosphate
  modified_base 12: mod_base = OTHER; note = 2'-O-methylguanosine-3'-phosphate
  modified_base 13: mod_base = OTHER; note = 2'-O-methyluridine-3'-phosphate
  modified_base 14: mod_base = OTHER; note = 2'-deoxy-2'-fluorocytidine-3'-phosphate
  modified_base 15: mod_base = OTHER; note = 2'-O-methylcytidine-3'-phosphate
  modified_base 16: mod_base = OTHER; note = 2'-deoxy-2'-fluorocytidine-3'-phosphate
  modified_base 17: mod_base = OTHER; note = 2'-O-methyladenosine-3'-phosphate
  modified_base 18: mod_base = OTHER; note = 2'-O-methylguanosine-3'-phosphate
  modified_base 19: mod_base = OTHER; note = 2'-O-methyladenosine-3'-phosphate
  modified_base 20: mod_base = OTHER; note = 2'-O-methyladenosine-3'-phosphate
  modified_base 21: mod_base = OTHER; note = 2'-O-methylguanosine-3'-phosphorothioate
  modified_base 22: mod_base = OTHER; note = 2'-O-methylcytidine-3'-phosphorothioate
  modified_base 23: mod_base = OTHER; note = 2'-O-methylcytidine
tttgatttcaagtcccagaagcc

SEQ ID NO: 386 - RNA, 23 nt, synthetic construct
  source 1..23: mol_type = other RNA
ggcttctgggacttgaaatcaaa

SEQ ID NO: 387 - RNA, 21 nt, synthetic construct
  source 1..21: mol_type = other RNA
  modified_base 1: mod_base = OTHER; note = 2'-O-methyluridine-3'-phosphorothioate
  modified_base 2: mod_base = OTHER; note = 2'-O-methylguanosine-3'-phosphorothioate
  modified_base 3: mod_base = OTHER; note = 2'-O-methylcytidine-3'-phosphate
  modified_base 4: mod_base = OTHER; note = 2'-O-methyladenosine-3'-phosphate
  modified_base 5: mod_base = OTHER; note = 2'-O-methyluridine-3'-phosphate
  modified_base 6: mod_base = OTHER; note = 2'-O-hexadecyl-uridine-3'-phosphate
  modified_base 7: mod_base = OTHER; note = 2'-deoxy-2'-fluoroadenosine-3'-phosphate
  modified_base 8: mod_base = OTHER; note = 2'-O-methyladenosine-3'-phosphate
  modified_base 9: mod_base = OTHER; note = 2'-deoxy-2'-fluorocytidine-3'-phosphate
  modified_base 10: mod_base = OTHER; note = 2'-deoxy-2'-fluorouridine-3'-phosphate
  modified_base 11: mod_base = OTHER; note = 2'-deoxy-2'-fluorouridine-3'-phosphate
  modified_base 12: mod_base = OTHER; note = 2'-O-methyluridine-3'-phosphate
  modified_base 13: mod_base = OTHER; note = 2'-O-methyluridine-3'-phosphate
  modified_base 14: mod_base = OTHER; note = 2'-O-methylguanosine-3'-phosphate
  modified_base 15: mod_base = OTHER; note = 2'-O-methyluridine-3'-phosphate
  modified_base 16: mod_base = OTHER; note = 2'-O-methyladenosine-3'-phosphate
  modified_base 17: mod_base = OTHER; note = 2'-O-methyladenosine-3'-phosphate
  modified_base 18: mod_base = OTHER; note = 2'-O-methylguanosine-3'-phosphate
  modified_base 19: mod_base = OTHER; note = 2'-O-methylguanosine-3'-phosphorothioate
  modified_base 20: mod_base = OTHER; note = 2'-O-methyluridine-3'-phosphorothioate
  modified_base 21: mod_base = OTHER; note = 2'-O-methyladenosine
tgcattaacttttgtaaggta

SEQ ID NO: 388 - RNA, 23 nt, synthetic construct
  source 1..23: mol_type = other RNA
  modified_base 1: mod_base = OTHER; note = 2'-O-methyluridine-3'-phosphorothioate 5'-(E)-Vinylphosphonate
  modified_base 2: mod_base = OTHER; note = 2'-deoxy-2'-fluoroadenosine-3'-phosphorothioate
  modified_base 3: mod_base = OTHER; note = 2'-O-methylcytidine-3'-phosphate
  modified_base 4: mod_base = OTHER; note = 2'-O-methylcytidine-3'-phosphate
  modified_base 5: mod_base = OTHER; note = 2'-O-methyluridine-3'-phosphate
  modified_base 6: mod_base = OTHER; note = 2'-deoxy-2'-fluorouridine-3'-phosphate
  modified_base 7: mod_base = OTHER; note = 2'-O-methyladenosine-3'-phosphate
  modified_base 8: mod_base = OTHER; note = 2'-deoxy-2'-fluorocytidine-3'-phosphate
  modified_base 9: mod_base = OTHER; note = 2'-deoxy-2'-fluoroadenosine-3'-phosphate
  modified_base 10: mod_base = OTHER; note = 2'-O-methyladenosine-3'-phosphate
  modified_base 11: mod_base = OTHER; note = 2'-O-methyladenosine-3'-phosphate
  modified_base 12: mod_base = OTHER; note = 2'-O-methyladenosine-3'-phosphate
  modified_base 13: mod_base = OTHER; note = 2'-O-methylguanosine-3'-phosphate
  modified_base 14: mod_base = OTHER; note = 2'-deoxy-2'-fluorouridine-3'-phosphate
  modified_base 15: mod_base = OTHER; note = 2'-O-methyluridine-3'-phosphate
  modified_base 16: mod_base = OTHER; note = 2'-deoxy-2'-fluoroadenosine-3'-phosphate
  modified_base 17: mod_base = OTHER; note = 2'-O-methyladenosine-3'-phosphate
  modified_base 18: mod_base = OTHER; note = 2'-O-methyluridine-3'-phosphate
  modified_base 19: mod_base = OTHER; note = 2'-O-methylguanosine-3'-phosphate
  modified_base 20: mod_base = OTHER; note = 2'-O-methylcytidine-3'-phosphate
  modified_base 21: mod_base = OTHER; note = 2'-O-methyladenosine-3'-phosphorothioate
  modified_base 22: mod_base = OTHER; note = 2'-O-methyluridine-3'-phosphorothioate
  modified_base 23: mod_base = OTHER; note = 2'-O-methyluridine
taccttacaaaagttaatgcatt

SEQ ID NO: 389 - RNA, 23 nt, synthetic construct
  source 1..23: mol_type = other RNA
aatgcattaacttttgtaaggta

SEQ ID NO: 390 - RNA, 21 nt, synthetic construct
  source 1..21: mol_type = other RNA
  modified_base 1: mod_base = OTHER; note = 2'-O-methyladenosine-3'-phosphorothioate
  modified_base 2: mod_base = OTHER; note = 2'-O-methylguanosine-3'-phosphorothioate
  modified_base 3: mod_base = OTHER; note = 2'-O-methyladenosine-3'-phosphate
  modified_base 4: mod_base = OTHER; note = 2'-O-methylguanosine-3'-phosphate
  modified_base 5: mod_base = OTHER; note = 2'-O-methylcytidine-3'-phosphate
  modified_base 6: mod_base = OTHER; note = 2'-O-hexadecyl-adenosine-3'-phosphate
  modified_base 7: mod_base = OTHER; note = 2'-deoxy-2'-fluoroguanosine-3'-phosphate
  modified_base 8: mod_base = OTHER; note = 2'-O-methyluridine-3'-phosphate
  modified_base 9: mod_base = OTHER; note = 2'-deoxy-2'-fluorouridine-3'-phosphate
  modified_base 10: mod_base = OTHER; note = 2'-deoxy-2'-fluoroadenosine-3'-phosphate
  modified_base 11: mod_base = OTHER; note = 2'-deoxy-2'-fluoroadenosine-3'-phosphate
  modified_base 12: mod_base = OTHER; note = 2'-O-methylcytidine-3'-phosphate
  modified_base 13: mod_base = OTHER; note = 2'-O-methyladenosine-3'-phosphate
  modified_base 14: mod_base = OTHER; note = 2'-O-methyluridine-3'-phosphate
  modified_base 15: mod_base = OTHER; note = 2'-O-methylcytidine-3'-phosphate
  modified_base 16: mod_base = OTHER; note = 2'-O-methyluridine-3'-phosphate
  modified_base 17: mod_base = OTHER; note = 2'-O-methylguanosine-3'-phosphate
  modified_base 18: mod_base = OTHER; note = 2'-O-methyladenosine-3'-phosphate
  modified_base 19: mod_base = OTHER; note = 2'-O-methyladenosine-3'-phosphorothioate
  modified_base 20: mod_base = OTHER; note = 2'-O-methylguanosine-3'-phosphorothioate
  modified_base 21: mod_base = OTHER; note = 2'-O-methyladenosine
agagcagttaacatctgaaga

SEQ ID NO: 391 - RNA, 23 nt, synthetic construct
  source 1..23: mol_type = other RNA
  modified_base 1: mod_base = OTHER; note = 2'-O-methyluridine-3'-phosphorothioate 5'-(E)-Vinylphosphonate
  modified_base 2: mod_base = OTHER; note = 2'-deoxy-2'-fluorocytidine-3'-phosphorothioate
  modified_base 3: mod_base = OTHER; note = 2'-O-methyluridine-3'-phosphate
  modified_base 4: mod_base = OTHER; note = 2'-O-methyluridine-3'-phosphate
  modified_base 5: mod_base = OTHER; note = 2'-O-methylcytidine-3'-phosphate
  modified_base 6: mod_base = OTHER; note = 2'-deoxy-2'-fluoroadenosine-3'-phosphate
  modified_base 7: mod_base = OTHER; note = 2'-O-methylguanosine-3'-phosphate
  modified_base 8: mod_base = OTHER; note = 2'-deoxy-2'-fluoroadenosine-3'-phosphate
  modified_base 9: mod_base = OTHER; note = 2'-deoxy-2'-fluorouridine-3'-phosphate
  modified_base 10: mod_base = OTHER; note = 2'-O-methylguanosine-3'-phosphate
  modified_base 11: mod_base = OTHER; note = 2'-O-methyluridine-3'-phosphate
  modified_base 12: mod_base = OTHER; note = 2'-O-methyluridine-3'-phosphate
  modified_base 13: mod_base = OTHER; note = 2'-O-methyladenosine-3'-phosphate
  modified_base 14: mod_base = OTHER; note = 2'-deoxy-2'-fluoroadenosine-3'-phosphate
  modified_base 15: mod_base = OTHER; note = 2'-O-methylcytidine-3'-phosphate
  modified_base 16: mod_base = OTHER; note = 2'-deoxy-2'-fluorouridine-3'-phosphate
  modified_base 17: mod_base = OTHER; note = 2'-O-methylguanosine-3'-phosphate
  modified_base 18: mod_base = OTHER; note = 2'-O-methylcytidine-3'-phosphate
  modified_base 19: mod_base = OTHER; note = 2'-O-methyluridine-3'-phosphate
  modified_base 20: mod_base = OTHER; note = 2'-O-methylcytidine-3'-phosphate
  modified_base 21: mod_base = OTHER; note = 2'-O-methyluridine-3'-phosphorothioate
  modified_base 22: mod_base = OTHER; note = 2'-O-methyladenosine-3'-phosphorothioate
  modified_base 23: mod_base = OTHER; note = 2'-O-methyladenosine
tcttcagatgttaactgctctaa

SEQ ID NO: 392 - RNA, 23 nt, synthetic construct
  source 1..23: mol_type = other RNA
ttagagcagttaacatctgaagt

SEQ ID NO: 393 - RNA, 21 nt, synthetic construct
  source 1..21: mol_type = other RNA
  modified_base 1: mod_base = OTHER; note = 2'-O-methyluridine-3'-phosphorothioate
  modified_base 2: mod_base = OTHER; note = 2'-O-methylguanosine-3'-phosphorothioate
  modified_base 3: mod_base = OTHER; note = 2'-O-methylguanosine-3'-phosphate
  modified_base 4: mod_base = OTHER; note = 2'-O-methylguanosine-3'-phosphate
  modified_base 5: mod_base = OTHER; note = 2'-O-methyladenosine-3'-phosphate
  modified_base 6: mod_base = OTHER; note = 2'-O-hexadecyl-adenosine-3'-phosphate
  modified_base 7: mod_base = OTHER; note = 2'-deoxy-2'-fluoroadenosine-3'-phosphate
  modified_base 8: mod_base = OTHER; note = 2'-O-methylcytidine-3'-phosphate
  modified_base 9: mod_base = OTHER; note = 2'-deoxy-2'-fluorocytidine-3'-phosphate
  modified_base 10: mod_base = OTHER; note = 2'-deoxy-2'-fluorocytidine-3'-phosphate
  modified_base 11: mod_base = OTHER; note = 2'-deoxy-2'-fluorouridine-3'-phosphate
  modified_base 12: mod_base = OTHER; note = 2'-O-methyluridine-3'-phosphate
  modified_base 13: mod_base = OTHER; note = 2'-O-methyluridine-3'-phosphate
  modified_base 14: mod_base = OTHER; note = 2'-O-methyluridine-3'-phosphate
  modified_base 15: mod_base = OTHER; note = 2'-O-methylguanosine-3'-phosphate
  modified_base 16: mod_base = OTHER; note = 2'-O-methylcytidine-3'-phosphate
  modified_base 17: mod_base = OTHER; note = 2'-O-methylguanosine-3'-phosphate
  modified_base 18: mod_base = OTHER; note = 2'-O-methyluridine-3'-phosphate
  modified_base 19: mod_base = OTHER; note = 2'-O-methylguanosine-3'-phosphorothioate
  modified_base 20: mod_base = OTHER; note = 2'-O-methylguanosine-3'-phosphorothioate
  modified_base 21: mod_base = OTHER; note = 2'-O-methyladenosine
tgggaaacccttttgcgtgga

SEQ ID NO: 394 - RNA, 23 nt, synthetic construct
  source 1..23: mol_type = other RNA
  modified_base 1: mod_base = OTHER; note = 2'-O-methyluridine-3'-phosphorothioate 5'-(E)-Vinylphosphonate
  modified_base 2: mod_base = OTHER; note = 2'-deoxy-2'-fluorocytidine-3'-phosphorothioate
  modified_base 3: mod_base = OTHER; note = 2'-O-methylcytidine-3'-phosphate
  modified_base 4: mod_base = OTHER; note = 2'-O-methyladenosine-3'-phosphate
  modified_base 5: mod_base = OTHER; note = 2'-O-methylcytidine-3'-phosphate
  modified_base 6: mod_base = OTHER; note = 2'-deoxy-2'-fluoroguanosine-3'-phosphate
  modified_base 7: mod_base = OTHER; note = 2'-O-methylcytidine-3'-phosphate
  modified_base 8: mod_base = OTHER; note = 2'-deoxy-2'-fluoroadenosine-3'-phosphate
  modified_base 9: mod_base = OTHER; note = 2'-deoxy-2'-fluoroadenosine-3'-phosphate
  modified_base 10: mod_base = OTHER; note = 2'-O-methyladenosine-3'-phosphate
  modified_base 11: mod_base = OTHER; note = 2'-O-methyladenosine-3'-phosphate
  modified_base 12: mod_base = OTHER; note = 2'-O-methylguanosine-3'-phosphate
  modified_base 13: mod_base = OTHER; note = 2'-O-methylguanosine-3'-phosphate
  modified_base 14: mod_base = OTHER; note = 2'-deoxy-2'-fluoroguanosine-3'-phosphate
  modified_base 15: mod_base = OTHER; note = 2'-O-methyluridine-3'-phosphate
  modified_base 16: mod_base = OTHER; note = 2'-deoxy-2'-fluorouridine-3'-phosphate
  modified_base 17: mod_base = OTHER; note = 2'-O-methyluridine-3'-phosphate
  modified_base 18: mod_base = OTHER; note = 2'-O-methylcytidine-3'-phosphate
  modified_base 19: mod_base = OTHER; note = 2'-O-methylcytidine-3'-phosphate
  modified_base 20: mod_base = OTHER; note = 2'-O-methylcytidine-3'-phosphate
  modified_base 21: mod_base = OTHER; note = 2'-O-methyladenosine-3'-phosphorothioate
  modified_base 22: mod_base = OTHER; note = 2'-O-methylcytidine-3'-phosphorothioate
  modified_base 23: mod_base = OTHER; note = 2'-O-methyladenosine
tccacgcaaaagggtttcccaca

SEQ ID NO: 395 - RNA, 23 nt, synthetic construct
  source 1..23: mol_type = other RNA
tgtgggaaacccttttgcgtggt

SEQ ID NO: 396 - RNA, 21 nt, synthetic construct
  source 1..21: mol_type = other RNA
  modified_base 1: mod_base = OTHER; note = 2'-O-methyluridine-3'-phosphorothioate
  modified_base 2: mod_base = OTHER; note = 2'-O-methylcytidine-3'-phosphorothioate
  modified_base 3: mod_base = OTHER; note = 2'-O-methyluridine-3'-phosphate
  modified_base 4: mod_base = OTHER; note = 2'-O-methyluridine-3'-phosphate
  modified_base 5: mod_base = OTHER; note = 2'-O-methyladenosine-3'-phosphate
  modified_base 6: mod_base = OTHER; note = 2'-O-hexadecyl-guanosine-3'-phosphate
  modified_base 7: mod_base = OTHER; note = 2'-deoxy-2'-fluorouridine-3'-phosphate
  modified_base 8: mod_base = OTHER; note = 2'-O-methyladenosine-3'-phosphate
  modified_base 9: mod_base = OTHER; note = 2'-deoxy-2'-fluoroguanosine-3'-phosphate
  modified_base 10: mod_base = OTHER; note = 2'-deoxy-2'-fluoroadenosine-3'-phosphate
  modified_base 11: mod_base = OTHER; note = 2'-deoxy-2'-fluoroguanosine-3'-phosphate
  modified_base 12: mod_base = OTHER; note = 2'-O-methyladenosine-3'-phosphate
  modified_base 13: mod_base = OTHER; note = 2'-O-methyluridine-3'-phosphate
  modified_base 14: mod_base = OTHER; note = 2'-O-methyluridine-3'-phosphate
  modified_base 15: mod_base = OTHER; note = 2'-O-methyluridine-3'-phosphate
  modified_base 16: mod_base = OTHER; note = 2'-O-methylcytidine-3'-phosphate
  modified_base 17: mod_base = OTHER; note = 2'-O-methyladenosine-3'-phosphate
  modified_base 18: mod_base = OTHER; note = 2'-O-methyluridine-3'-phosphate
  modified_base 19: mod_base = OTHER; note = 2'-O-methyladenosine-3'-phosphorothioate
  modified_base 20: mod_base = OTHER; note = 2'-O-methylguanosine-3'-phosphorothioate
  modified_base 21: mod_base = OTHER; note = 2'-O-methyladenosine
tcttagtagagatttcataga

SEQ ID NO: 397 - RNA, 23 nt, synthetic construct
  source 1..23: mol_type = other RNA
  modified_base 1: mod_base = OTHER; note = 2'-O-methyluridine-3'-phosphorothioate 5'-(E)-Vinylphosphonate
  modified_base 2: mod_base = OTHER; note = 2'-deoxy-2'-fluorocytidine-3'-phosphorothioate
  modified_base 3: mod_base = OTHER; note = 2'-O-methyluridine-3'-phosphate
  modified_base 4: mod_base = OTHER; note = 2'-O-methyladenosine-3'-phosphate
  modified_base 5: mod_base = OTHER; note = 2'-O-methyluridine-3'-phosphate
  modified_base 6: mod_base = OTHER; note = 2'-deoxy-2'-fluoroguanosine-3'-phosphate
  modified_base 7: mod_base = OTHER; note = 2'-O-methyladenosine-3'-phosphate
  modified_base 8: mod_base = OTHER; note = 2'-deoxy-2'-fluoroadenosine-3'-phosphate
  modified_base 9: mod_base = OTHER; note = 2'-deoxy-2'-fluoroadenosine-3'-phosphate
  modified_base 10: mod_base = OTHER; note = 2'-O-methyluridine-3'-phosphate
  modified_base 11: mod_base = OTHER; note = 2'-O-methylcytidine-3'-phosphate
  modified_base 12: mod_base = OTHER; note = 2'-O-methyluridine-3'-phosphate
  modified_base 13: mod_base = OTHER; note = 2'-O-methylcytidine-3'-phosphate
  modified_base 14: mod_base = OTHER; note = 2'-deoxy-2'-fluorouridine-3'-phosphate
  modified_base 15: mod_base = OTHER; note = 2'-O-methyladenosine-3'-phosphate
  modified_base 16: mod_base = OTHER; note = 2'-deoxy-2'-fluorocytidine-3'-phosphate
  modified_base 17: mod_base = OTHER; note = 2'-O-methyluridine-3'-phosphate
  modified_base 18: mod_base = OTHER; note = 2'-O-methyladenosine-3'-phosphate
  modified_base 19: mod_base = OTHER; note = 2'-O-methyladenosine-3'-phosphate
  modified_base 20: mod_base = OTHER; note = 2'-O-methylguanosine-3'-phosphate
  modified_base 21: mod_base = OTHER; note = 2'-O-methyladenosine-3'-phosphorothioate
  modified_base 22: mod_base = OTHER; note = 2'-O-methyluridine-3'-phosphorothioate
  modified_base 23: mod_base = OTHER; note = 2'-O-methyladenosine
tctatgaaatctctactaagata

SEQ ID NO: 398 - RNA, 23 nt, synthetic construct
  source 1..23: mol_type = other RNA
tatcttagtagagatttcatagc

SEQ ID NO: 399 - RNA, 21 nt, synthetic construct
  source 1..21: mol_type = other RNA
  modified_base 1: mod_base = OTHER; note = 2'-O-methylcytidine-3'-phosphorothioate
  modified_base 2: mod_base = OTHER; note = 2'-O-methyladenosine-3'-phosphorothioate
  modified_base 3: mod_base = OTHER; note = 2'-O-methylcytidine-3'-phosphate
  modified_base 4: mod_base = OTHER; note = 2'-O-methylguanosine-3'-phosphate
  modified_base 5: mod_base = OTHER; note = 2'-O-methyladenosine-3'-phosphate
  modified_base 6: mod_base = OTHER; note = 2'-O-hexadecyl-cytidine-3'-phosphate
  modified_base 7: mod_base = OTHER; note = 2'-deoxy-2'-fluorouridine-3'-phosphate
  modified_base 8: mod_base = OTHER; note = 2'-O-methylguanosine-3'-phosphate
  modified_base 9: mod_base = OTHER; note = 2'-deoxy-2'-fluorocytidine-3'-phosphate
  modified_base 10: mod_base = OTHER; note = 2'-deoxy-2'-fluoroguanosine-3'-phosphate
  modified_base 11: mod_base = OTHER; note = 2'-deoxy-2'-fluorouridine-3'-phosphate
  modified_base 12: mod_base = OTHER; note = 2'-O-methylcytidine-3'-phosphate
  modified_base 13: mod_base = OTHER; note = 2'-O-methyladenosine-3'-phosphate
  modified_base 14: mod_base = OTHER; note = 2'-O-methyladenosine-3'-phosphate
  modified_base 15: mod_base = OTHER; note = 2'-O-methyluridine-3'-phosphate
  modified_base 16: mod_base = OTHER; note = 2'-O-methyladenosine-3'-phosphate
  modified_base 17: mod_base = OTHER; note = 2'-O-methyluridine-3'-phosphate
  modified_base 18: mod_base = OTHER; note = 2'-O-methylcytidine-3'-phosphate
  modified_base 19: mod_base = OTHER; note = 2'-O-methyladenosine-3'-phosphorothioate
  modified_base 20: mod_base = OTHER; note = 2'-O-methylcytidine-3'-phosphorothioate
  modified_base 21: mod_base = OTHER; note = 2'-O-methyladenosine
cacgactgcgtcaatatcaca

SEQ ID NO: 400 - RNA, 23 nt, synthetic construct
  source 1..23: mol_type = other RNA
  modified_base 1: mod_base = OTHER; note = 2'-O-methyluridine-3'-phosphorothioate 5'-(E)-Vinylphosphonate
  modified_base 2: mod_base = OTHER; note = 2'-deoxy-2'-fluoroguanosine-3'-phosphorothioate
  modified_base 3: mod_base = OTHER; note = 2'-O-methyluridine-3'-phosphate
  modified_base 4: mod_base = OTHER; note = 2'-O-methylguanosine-3'-phosphate
  modified_base 5: mod_base = OTHER; note = 2'-O-methyladenosine-3'-phosphate
  modified_base 6: mod_base = OTHER; note = 2'-deoxy-2'-fluorouridine-3'-phosphate
  modified_base 7: mod_base = OTHER; note = 2'-O-methyladenosine-3'-phosphate
  modified_base 8: mod_base = OTHER; note = 2'-deoxy-2'-fluorouridine-3'-phosphate
  modified_base 9: mod_base = OTHER; note = 2'-deoxy-2'-fluorouridine-3'-phosphate
  modified_base 10: mod_base = OTHER; note = 2'-O-methylguanosine-3'-phosphate
  modified_base 11: mod_base = OTHER; note = 2'-O-methyladenosine-3'-phosphate
  modified_base 12: mod_base = OTHER; note = 2'-O-methylcytidine-3'-phosphate
  modified_base 13: mod_base = OTHER; note = 2'-O-methylguanosine-3'-phosphate
  modified_base 14: mod_base = OTHER; note = 2'-deoxy-2'-fluorocytidine-3'-phosphate
  modified_base 15: mod_base = OTHER; note = 2'-O-methyladenosine-3'-phosphate
  modified_base 16: mod_base = OTHER; note = 2'-deoxy-2'-fluoroguanosine-3'-phosphate
  modified_base 17: mod_base = OTHER; note = 2'-O-methyluridine-3'-phosphate
  modified_base 18: mod_base = OTHER; note = 2'-O-methylcytidine-3'-phosphate
  modified_base 19: mod_base = OTHER; note = 2'-O-methylguanosine-3'-phosphate
  modified_base 20: mod_base = OTHER; note = 2'-O-methyluridine-3'-phosphate
  modified_base 21: mod_base = OTHER; note = 2'-O-methylguanosine-3'-phosphorothioate
  modified_base 22: mod_base = OTHER; note = 2'-O-methylcytidine-3'-phosphorothioate
  modified_base 23: mod_base = OTHER; note = 2'-O-methyladenosine
tgtgatattgacgcagtcgtgca

SEQ ID NO: 401 - RNA, 23 nt, synthetic construct
  source 1..23: mol_type = other RNA
tgcacgactgcgtcaatatcaca

SEQ ID NO: 402 - RNA, 21 nt, synthetic construct
  source 1..21: mol_type = other RNA
  modified_base 1: mod_base = OTHER; note = 2'-O-methyladenosine-3'-phosphorothioate
  modified_base 2: mod_base = OTHER; note = 2'-O-methylcytidine-3'-phosphorothioate
  modified_base 3: mod_base = OTHER; note = 2'-O-methyladenosine-3'-phosphate
  modified_base 4: mod_base = OTHER; note = 2'-O-methyluridine-3'-phosphate
  modified_base 5: mod_base = OTHER; note = 2'-O-methylcytidine-3'-phosphate
  modified_base 6: mod_base = OTHER; note = 2'-O-hexadecyl-uridine-3'-phosphate
  modified_base 7: mod_base = OTHER; note = 2'-deoxy-2'-fluoroguanosine-3'-phosphate
  modified_base 8: mod_base = OTHER; note = 2'-O-methyladenosine-3'-phosphate
  modified_base 9: mod_base = OTHER; note = 2'-deoxy-2'-fluoroadenosine-3'-phosphate
  modified_base 10: mod_base = OTHER; note = 2'-deoxy-2'-fluoroguanosine-3'-phosphate
  modified_base 11: mod_base = OTHER; note = 2'-deoxy-2'-fluorouridine-3'-phosphate
  modified_base 12: mod_base = OTHER; note = 2'-O-methylguanosine-3'-phosphate
  modified_base 13: mod_base = OTHER; note = 2'-O-methyluridine-3'-phosphate
  modified_base 14: mod_base = OTHER; note = 2'-O-methylcytidine-3'-phosphate
  modified_base 15: mod_base = OTHER; note = 2'-O-methyluridine-3'-phosphate
  modified_base 16: mod_base = OTHER; note = 2'-O-methyladenosine-3'-phosphate
  modified_base 17: mod_base = OTHER; note = 2'-O-methyladenosine-3'-phosphate
  modified_base 18: mod_base = OTHER; note = 2'-O-methyluridine-3'-phosphate
  modified_base 19: mod_base = OTHER; note = 2'-O-methylguanosine-3'-phosphorothioate
  modified_base 20: mod_base = OTHER; note = 2'-O-methylcytidine-3'-phosphorothioate
  modified_base 21: mod_base = OTHER; note = 2'-O-methyladenosine
acatctgaagtgtctaatgca

SEQ ID NO: 403 - RNA, 23 nt, synthetic construct
  source 1..23: mol_type = other RNA
  modified_base 1: mod_base = OTHER; note = 2'-O-methyluridine-3'-phosphorothioate 5'-(E)-Vinylphosphonate
  modified_base 2: mod_base = OTHER; note = 2'-deoxy-2'-fluoroguanosine-3'-phosphorothioate
  modified_base 3: mod_base = OTHER; note = 2'-O-methylcytidine-3'-phosphate
  modified_base 4: mod_base = OTHER; note = 2'-O-methyladenosine-3'-phosphate
  modified_base 5: mod_base = OTHER; note = 2'-O-methyluridine-3'-phosphate
  modified_base 6: mod_base = OTHER; note = 2'-deoxy-2'-fluorouridine-3'-phosphate
  modified_base 7: mod_base = OTHER; note = 2'-O-methyladenosine-3'-phosphate
  modified_base 8: mod_base = OTHER; note = 2'-deoxy-2'-fluoroguanosine-3'-phosphate
  modified_base 9: mod_base = OTHER; note = 2'-deoxy-2'-fluoroadenosine-3'-phosphate
  modified_base 10: mod_base = OTHER; note = 2'-O-methylcytidine-3'-phosphate
  modified_base 11: mod_base = OTHER; note = 2'-O-methyladenosine-3'-phosphate
  modified_base 12: mod_base = OTHER; note = 2'-O-methylcytidine-3'-phosphate
  modified_base 13: mod_base = OTHER; note = 2'-O-methyluridine-3'-phosphate
  modified_base 14: mod_base = OTHER; note = 2'-deoxy-2'-fluorouridine-3'-phosphate
  modified_base 15: mod_base = OTHER; note = 2'-O-methylcytidine-3'-phosphate
  modified_base 16: mod_base = OTHER; note = 2'-deoxy-2'-fluoroadenosine-3'-phosphate
  modified_base 17: mod_base = OTHER; note = 2'-O-methylguanosine-3'-phosphate
  modified_base 18: mod_base = OTHER; note = 2'-O-methyladenosine-3'-phosphate
  modified_base 19: mod_base = OTHER; note = 2'-O-methyluridine-3'-phosphate
  modified_base 20: mod_base = OTHER; note = 2'-O-methylguanosine-3'-phosphate
  modified_base 21: mod_base = OTHER; note = 2'-O-methyluridine-3'-phosphorothioate
  modified_base 22: mod_base = OTHER; note = 2'-O-methyluridine-3'-phosphorothioate
  modified_base 23: mod_base = OTHER; note = 2'-O-methyladenosine
tgcattagacacttcagatgtta

SEQ ID NO: 404 - RNA, 23 nt, synthetic construct
  source 1..23: mol_type = other RNA
taacatctgaagtgtctaatgca

SEQ ID NO: 405 - RNA, 21 nt, synthetic construct
  source 1..21: mol_type = other RNA
  modified_base 1: mod_base = OTHER; note = 2'-O-methyladenosine-3'-phosphorothioate
  modified_base 2: mod_base = OTHER; note = 2'-O-methyluridine-3'-phosphorothioate
  modified_base 3: mod_base = OTHER; note = 2'-O-methyladenosine-3'-phosphate
  modified_base 4: mod_base = OTHER; note = 2'-O-methyluridine-3'-phosphate
  modified_base 5: mod_base = OTHER; note = 2'-O-methylguanosine-3'-phosphate
  modified_base 6: mod_base = OTHER; note = 2'-O-hexadecyl-uridine-3'-phosphate
  modified_base 7: mod_base = OTHER; note = 2'-deoxy-2'-fluoroguanosine-3'-phosphate
  modified_base 8: mod_base = OTHER; note = 2'-O-methylguanosine-3'-phosphate
  modified_base 9: mod_base = OTHER; note = 2'-deoxy-2'-fluorocytidine-3'-phosphate
  modified_base 10: mod_base = OTHER; note = 2'-deoxy-2'-fluoroadenosine-3'-phosphate
  modified_base 11: mod_base = OTHER; note = 2'-deoxy-2'-fluorouridine-3'-phosphate
  modified_base 12: mod_base = OTHER; note = 2'-O-methyluridine-3'-phosphate
  modified_base 13: mod_base = OTHER; note = 2'-O-methylcytidine-3'-phosphate
  modified_base 14: mod_base = OTHER; note = 2'-O-methylcytidine-3'-phosphate
  modified_base 15: mod_base = OTHER; note = 2'-O-methyluridine-3'-phosphate
  modified_base 16: mod_base = OTHER; note = 2'-O-methyluridine-3'-phosphate
  modified_base 17: mod_base = OTHER; note = 2'-O-methyluridine-3'-phosphate
  modified_base 18: mod_base = OTHER; note = 2'-O-methylcytidine-3'-phosphate
  modified_base 19: mod_base = OTHER; note = 2'-O-methyluridine-3'-phosphorothioate
  modified_base 20: mod_base = OTHER; note = 2'-O-methyluridine-3'-phosphorothioate
  modified_base 21: mod_base = OTHER; note = 2'-O-methyladenosine
atatgtggcattcctttctta

SEQ ID NO: 406 - RNA, 23 nt, synthetic construct
  source 1..23: mol_type = other RNA
  modified_base 1: mod_base = OTHER; note = 2'-O-methyluridine-3'-phosphorothioate 5'-(E)-Vinylphosphonate
  modified_base 2: mod_base = OTHER; note = 2'-deoxy-2'-fluoroadenosine-3'-phosphorothioate
  modified_base 3: mod_base = OTHER; note = 2'-O-methyladenosine-3'-phosphate
  modified_base 4: mod_base = OTHER; note = 2'-O-methylguanosine-3'-phosphate
  modified_base 5: mod_base = OTHER; note = 2'-O-methyladenosine-3'-phosphate
  modified_base 6: mod_base = OTHER; note = 2'-deoxy-2'-fluoroadenosine-3'-phosphate
  modified_base 7: mod_base = OTHER; note = 2'-O-methyladenosine-3'-phosphate
  modified_base 8: mod_base = OTHER; note = 2'-deoxy-2'-fluoroguanosine-3'-phosphate
  modified_base 9: mod_base = OTHER; note = 2'-deoxy-2'-fluoroguanosine-3'-phosphate
  modified_base 10: mod_base = OTHER; note = 2'-O-methyladenosine-3'-phosphate
  modified_base 11: mod_base = OTHER; note = 2'-O-methyladenosine-3'-phosphate
  modified_base 12: mod_base = OTHER; note = 2'-O-methyluridine-3'-phosphate
  modified_base 13: mod_base = OTHER; note = 2'-O-methylguanosine-3'-phosphate
  modified_base 14: mod_base = OTHER; note = 2'-deoxy-2'-fluorocytidine-3'-phosphate
  modified_base 15: mod_base = OTHER; note = 2'-O-methylcytidine-3'-phosphate
  modified_base 16: mod_base = OTHER; note = 2'-deoxy-2'-fluoroadenosine-3'-phosphate
  modified_base 17: mod_base = OTHER; note = 2'-O-methylcytidine-3'-phosphate
  modified_base 18: mod_base = OTHER; note = 2'-O-methyladenosine-3'-phosphate
  modified_base 19: mod_base = OTHER; note = 2'-O-methyluridine-3'-phosphate
  modified_base 20: mod_base = OTHER; note = 2'-O-methyladenosine-3'-phosphate
  modified_base 21: mod_base = OTHER; note = 2'-O-methyluridine-3'-phosphorothioate
  modified_base 22: mod_base = OTHER; note = 2'-O-methyladenosine-3'-phosphorothioate
  modified_base 23: mod_base = OTHER; note = 2'-O-methylguanosine
taagaaaggaatgccacatatag

SEQ ID NO: 407 - RNA, 23 nt, synthetic construct
  source 1..23: mol_type = other RNA
ctatatgtggcattcctttcttt

SEQ ID NO: 408 - RNA, 21 nt, synthetic construct
  source 1..21: mol_type = other RNA
  modified_base 1: mod_base = OTHER; note = 2'-O-methyluridine-3'-phosphorothioate
  modified_base 2: mod_base = OTHER; note = 2'-O-methyluridine-3'-phosphorothioate
  modified_base 3: mod_base = OTHER; note = 2'-O-methylguanosine-3'-phosphate
  modified_base 4: mod_base = OTHER; note = 2'-O-methyladenosine-3'-phosphate
  modified_base 5: mod_base = OTHER; note = 2'-O-methylguanosine-3'-phosphate
  modified_base 6: mod_base = OTHER; note = 2'-O-hexadecyl-guanosine-3'-phosphate
  modified_base 7: mod_base = OTHER; note = 2'-deoxy-2'-fluorocytidine-3'-phosphate
  modified_base 8: mod_base = OTHER; note = 2'-O-methyluridine-3'-phosphate
  modified_base 9: mod_base = OTHER; note = 2'-deoxy-2'-fluoroadenosine-3'-phosphate
  modified_base 10: mod_base = OTHER; note = 2'-deoxy-2'-fluoroadenosine-3'-phosphate
  modified_base 11: mod_base = OTHER; note = 2'-deoxy-2'-fluoroadenosine-3'-phosphate
  modified_base 12: mod_base = OTHER; note = 2'-O-methyladenosine-3'-phosphate
  modified_base 13: mod_base = OTHER; note = 2'-O-methylcytidine-3'-phosphate
  modified_base 14: mod_base = OTHER; note = 2'-O-methyladenosine-3'-phosphate
  modified_base 15: mod_base = OTHER; note = 2'-O-methyladenosine-3'-phosphate
  modified_base 16: mod_base = OTHER; note = 2'-O-methyladenosine-3'-phosphate
  modified_base 17: mod_base = OTHER; note = 2'-O-methyluridine-3'-phosphate
  modified_base 18: mod_base = OTHER; note = 2'-O-methylcytidine-3'-phosphate
  modified_base 19: mod_base = OTHER; note = 2'-O-methyluridine-3'-phosphorothioate
  modified_base 20: mod_base = OTHER; note = 2'-O-methylcytidine-3'-phosphorothioate
  modified_base 21: mod_base = OTHER; note = 2'-O-methyladenosine
ttgaggctaaaacaaatctca

SEQ ID NO: 409 - RNA, 23 nt, synthetic construct
  source 1..23: mol_type = other RNA
  modified_base 1: mod_base = OTHER; note = 2'-O-methyluridine-3'-phosphorothioate 5'-(E)-Vinylphosphonate
  modified_base 2: mod_base = OTHER; note = 2'-deoxy-2'-fluoroguanosine-3'-phosphorothioate
  modified_base 3: mod_base = OTHER; note = 2'-O-methyladenosine-3'-phosphate
  modified_base 4: mod_base = OTHER; note = 2'-O-methylguanosine-3'-phosphate
  modified_base 5: mod_base = OTHER; note = 2'-O-methyladenosine-3'-phosphate
  modified_base 6: mod_base = OTHER; note = 2'-deoxy-2'-fluorouridine-3'-phosphate
  modified_base 7: mod_base = OTHER; note = 2'-O-methyluridine-3'-phosphate
  modified_base 8: mod_base = OTHER; note = 2'-deoxy-2'-fluorouridine-3'-phosphate
  modified_base 9: mod_base = OTHER; note = 2'-deoxy-2'-fluoroguanosine-3'-phosphate
  modified_base 10: mod_base = OTHER; note = 2'-O-methyluridine-3'-phosphate
  modified_base 11: mod_base = OTHER; note = 2'-O-methyluridine-3'-phosphate
  modified_base 12: mod_base = OTHER; note = 2'-O-methyluridine-3'-phosphate
  modified_base 13: mod_base = OTHER; note = 2'-O-methyluridine-3'-phosphate
  modified_base 14: mod_base = OTHER; note = 2'-deoxy-2'-fluoroadenosine-3'-phosphate
  modified_base 15: mod_base = OTHER; note = 2'-O-methylguanosine-3'-phosphate
  modified_base 16: mod_base = OTHER; note = 2'-deoxy-2'-fluorocytidine-3'-phosphate
  modified_base 17: mod_base = OTHER; note = 2'-O-methylcytidine-3'-phosphate
  modified_base 18: mod_base = OTHER; note = 2'-O-methyluridine-3'-phosphate
  modified_base 19: mod_base = OTHER; note = 2'-O-methylcytidine-3'-phosphate
  modified_base 20: mod_base = OTHER; note = 2'-O-methyladenosine-3'-phosphate
  modified_base 21: mod_base = OTHER; note = 2'-O-methyladenosine-3'-phosphorothioate
  modified_base 22: mod_base = OTHER; note = 2'-O-methylcytidine-3'-phosphorothioate
  modified_base 23: mod_base = OTHER; note = 2'-O-methylcytidine
tgagatttgttttagcctcaacc

SEQ ID NO: 410 - RNA, 23 nt, synthetic construct
  source 1..23: mol_type = other RNA
ggttgaggctaaaacaaatctca

SEQ ID NO: 411 - RNA, 21 nt, synthetic construct
  source 1..21: mol_type = other RNA
  modified_base 1: mod_base = OTHER; note = 2'-O-methyladenosine-3'-phosphorothioate
  modified_base 2: mod_base = OTHER; note = 2'-O-methyluridine-3'-phosphorothioate
  modified_base 3: mod_base = OTHER; note = 2'-O-methylcytidine-3'-phosphate
  modified_base 4: mod_base = OTHER; note = 2'-O-methyluridine-3'-phosphate
  modified_base 5: mod_base = OTHER; note = 2'-O-methylcytidine-3'-phosphate
  modified_base 6: mod_base = OTHER; note = 2'-O-hexadecyl-cytidine-3'-phosphate
  modified_base 7: mod_base = OTHER; note = 2'-deoxy-2'-fluorouridine-3'-phosphate
  modified_base 8: mod_base = OTHER; note = 2'-O-methyluridine-3'-phosphate
  modified_base 9: mod_base = OTHER; note = 2'-deoxy-2'-fluorouridine-3'-phosphate
  modified_base 10: mod_base = OTHER; note = 2'-deoxy-2'-fluoroguanosine-3'-phosphate
  modified_base 11: mod_base = OTHER; note = 2'-deoxy-2'-fluorouridine-3'-phosphate
  modified_base 12: mod_base = OTHER; note = 2'-O-methylcytidine-3'-phosphate
  modified_base 13: mod_base = OTHER; note = 2'-O-methylcytidine-3'-phosphate
  modified_base 14: mod_base = OTHER; note = 2'-O-methyladenosine-3'-phosphate
  modified_base 15: mod_base = OTHER; note = 2'-O-methyluridine-3'-phosphate
  modified_base 16: mod_base = OTHER; note = 2'-O-methyluridine-3'-phosphate
  modified_base 17: mod_base = OTHER; note = 2'-O-methyluridine-3'-phosphate
  modified_base 18: mod_base = OTHER; note = 2'-O-methyladenosine-3'-phosphate
  modified_base 19: mod_base = OTHER; note = 2'-O-methylcytidine-3'-phosphorothioate
  modified_base 20: mod_base = OTHER; note = 2'-O-methylcytidine-3'-phosphorothioate
  modified_base 21: mod_base = OTHER; note = 2'-O-methyladenosine
atctcctttgtccatttacca

SEQ ID NO: 412 - RNA, 23 nt, synthetic construct
  source 1..23: mol_type = other RNA
  modified_base 1: mod_base = OTHER; note = 2'-O-methyluridine-3'-phosphorothioate 5'-(E)-Vinylphosphonate
  modified_base 2: mod_base = OTHER; note = 2'-deoxy-2'-fluoroguanosine-3'-phosphorothioate
  modified_base 3: mod_base = OTHER; note = 2'-O-methylguanosine-3'-phosphate
  modified_base 4: mod_base = OTHER; note = 2'-O-methyluridine-3'-phosphate
  modified_base 5: mod_base = OTHER; note = 2'-O-methyladenosine-3'-phosphate
  modified_base 6: mod_base = OTHER; note = 2'-deoxy-2'-fluoroadenosine-3'-phosphate
  modified_base 7: mod_base = OTHER; note = 2'-O-methyladenosine-3'-phosphate
  modified_base 8: mod_base = OTHER; note = 2'-deoxy-2'-fluorouridine-3'-phosphate
  modified_base 9: mod_base = OTHER; note = 2'-deoxy-2'-fluoroguanosine-3'-phosphate
  modified_base 10: mod_base = OTHER; note = 2'-O-methylguanosine-3'-phosphate
  modified_base 11: mod_base = OTHER; note = 2'-O-methyladenosine-3'-phosphate
  modified_base 12: mod_base = OTHER; note = 2'-O-methylcytidine-3'-phosphate
  modified_base 13: mod_base = OTHER; note = 2'-O-methyladenosine-3'-phosphate
  modified_base 14: mod_base = OTHER; note = 2'-deoxy-2'-fluoroadenosine-3'-phosphate
  modified_base 15: mod_base = OTHER; note = 2'-O-methyladenosine-3'-phosphate
  modified_base 16: mod_base = OTHER; note = 2'-deoxy-2'-fluoroguanosine-3'-phosphate
  modified_base 17: mod_base = OTHER; note = 2'-O-methylguanosine-3'-phosphate
  modified_base 18: mod_base = OTHER; note = 2'-O-methyladenosine-3'-phosphate
  modified_base 19: mod_base = OTHER; note = 2'-O-methylguanosine-3'-phosphate
  modified_base 20: mod_base = OTHER; note = 2'-O-methyladenosine-3'-phosphate
  modified_base 21: mod_base = OTHER; note = 2'-O-methyluridine-3'-phosphorothioate
  modified_base 22: mod_base = OTHER; note = 2'-O-methyluridine-3'-phosphorothioate
  modified_base 23: mod_base = OTHER; note = 2'-O-methyluridine
tggtaaatggacaaaggagattt

SEQ ID NO: 413 - RNA, 23 nt, synthetic construct
  source 1..23: mol_type = other RNA
aaatctcctttgtccatttacct

SEQ ID NO: 414 - RNA, 21 nt, synthetic construct
  source 1..21: mol_type = other RNA
  modified_base 1: mod_base = OTHER; note = 2'-O-methylguanosine-3'-phosphorothioate
  modified_base 2: mod_base = OTHER; note = 2'-O-methyluridine-3'-phosphorothioate
  modified_base 3: mod_base = OTHER; note = 2'-O-methylguanosine-3'-phosphate
  modified_base 4: mod_base = OTHER; note = 2'-O-methylcytidine-3'-phosphate
  modified_base 5: mod_base = OTHER; note = 2'-O-methyladenosine-3'-phosphate
  modified_base 6: mod_base = OTHER; note = 2'-O-hexadecyl-cytidine-3'-phosphate
  modified_base 7: mod_base = OTHER; note = 2'-deoxy-2'-fluorouridine-3'-phosphate
  modified_base 8: mod_base = OTHER; note = 2'-O-methylguanosine-3'-phosphate
  modified_base 9: mod_base = OTHER; note = 2'-deoxy-2'-fluoroadenosine-3'-phosphate
  modified_base 10: mod_base = OTHER; note = 2'-deoxy-2'-fluoroadenosine-3'-phosphate
  modified_base 11: mod_base = OTHER; note = 2'-deoxy-2'-fluorouridine-3'-phosphate
  modified_base 12: mod_base = OTHER; note = 2'-O-methylcytidine-3'-phosphate
  modified_base 13: mod_base = OTHER; note = 2'-O-methylguanosine-3'-phosphate
  modified_base 14: mod_base = OTHER; note = 2'-O-methyluridine-3'-phosphate
  modified_base 15: mod_base = OTHER; note = 2'-O-methyluridine-3'-phosphate
  modified_base 16: mod_base = OTHER; note = 2'-O-methyluridine-3'-phosphate
  modified_base 17: mod_base = OTHER; note = 2'-O-methylcytidine-3'-phosphate
  modified_base 18: mod_base = OTHER; note = 2'-O-methyladenosine-3'-phosphate
  modified_base 19: mod_base = OTHER; note = 2'-O-methyluridine-3'-phosphorothioate
  modified_base 20: mod_base = OTHER; note = 2'-O-methylguanosine-3'-phosphorothioate
  modified_base 21: mod_base = OTHER; note = 2'-O-methyladenosine
gtgcactgaatcgtttcatga

SEQ ID NO: 415 - RNA, 23 nt, synthetic construct
  source 1..23: mol_type = other RNA
  modified_base 1: mod_base = OTHER; note = 2'-O-methyluridine-3'-phosphorothioate 5'-(E)-Vinylphosphonate
  modified_base 2: mod_base = OTHER; note = 2'-deoxy-2'-fluorocytidine-3'-phosphorothioate
  modified_base 3: mod_base = OTHER; note = 2'-O-methyladenosine-3'-phosphate
  modified_base 4: mod_base = OTHER; note = 2'-O-methyluridine-3'-phosphate
  modified_base 5: mod_base = OTHER; note = 2'-O-methylguanosine-3'-phosphate
  modified_base 6: mod_base = OTHER; note = 2'-deoxy-2'-fluoroadenosine-3'-phosphate
  modified_base 7: mod_base = OTHER; note = 2'-O-methyladenosine-3'-phosphate
  modified_base 8: mod_base = OTHER; note = 2'-deoxy-2'-fluoroadenosine-3'-phosphate
  modified_base 9: mod_base = OTHER; note = 2'-deoxy-2'-fluorocytidine-3'-phosphate
  modified_base 10: mod_base = OTHER; note = 2'-O-methylguanosine-3'-phosphate
  modified_base 11: mod_base = OTHER; note = 2'-O-methyladenosine-3'-phosphate
  modified_base 12: mod_base = OTHER; note = 2'-O-methyluridine-3'-phosphate
  modified_base 13: mod_base = OTHER; note = 2'-O-methyluridine-3'-phosphate
  modified_base 14: mod_base = OTHER; note = 2'-deoxy-2'-fluorocytidine-3'-phosphate
  modified_base 15: mod_base = OTHER; note = 2'-O-methyladenosine-3'-phosphate
  modified_base 16: mod_base = OTHER; note = 2'-deoxy-2'-fluoroguanosine-3'-phosphate
  modified_base 17: mod_base = OTHER; note = 2'-O-methyluridine-3'-phosphate
  modified_base 18: mod_base = OTHER; note = 2'-O-methylguanosine-3'-phosphate
  modified_base 19: mod_base = OTHER; note = 2'-O-methylcytidine-3'-phosphate
  modified_base 20: mod_base = OTHER; note = 2'-O-methyladenosine-3'-phosphate
  modified_base 21: mod_base = OTHER; note = 2'-O-methylcytidine-3'-phosphorothioate
  modified_base 22: mod_base = OTHER; note = 2'-O-methyladenosine-3'-phosphorothioate
  modified_base 23: mod_base = OTHER; note = 2'-O-methyluridine
tcatgaaacgattcagtgcacat

SEQ ID NO: 416 - RNA, 23 nt, synthetic construct
  source 1..23: mol_type = other RNA
atgtgcactgaatcgtttcatgt

SEQ ID NO: 417 - RNA, 21 nt, synthetic construct
  source 1..21: mol_type = other RNA
  modified_base 1: mod_base = OTHER; note = 2'-O-methyluridine-3'-phosphorothioate
  modified_base 2: mod_base = OTHER; note = 2'-O-methyluridine-3'-phosphorothioate
  modified_base 3: mod_base = OTHER; note = 2'-O-methylguanosine-3'-phosphate
  modified_base 4: mod_base = OTHER; note = 2'-O-methyluridine-3'-phosphate
  modified_base 5: mod_base = OTHER; note = 2'-O-methylguanosine-3'-phosphate
  modified_base 6: mod_base = OTHER; note = 2'-O-hexadecyl-cytidine-3'-phosphate
  modified_base 7: mod_base = OTHER; note = 2'-deoxy-2'-fluoroadenosine-3'-phosphate
  modified_base 8: mod_base = OTHER; note = 2'-O-methylcytidine-3'-phosphate
  modified_base 9: mod_base = OTHER; note = 2'-deoxy-2'-fluoroguanosine-3'-phosphate
  modified_base 10: mod_base = OTHER; note = 2'-deoxy-2'-fluoroadenosine-3'-phosphate
  modified_base 11: mod_base = OTHER; note = 2'-deoxy-2'-fluorocytidine-3'-phosphate
  modified_base 12: mod_base = OTHER; note = 2'-O-methyluridine-3'-phosphate
  modified_base 13: mod_base = OTHER; note = 2'-O-methylguanosine-3'-phosphate
  modified_base 14: mod_base = OTHER; note = 2'-O-methylcytidine-3'-phosphate
  modified_base 15: mod_base = OTHER; note = 2'-O-methylguanosine-3'-phosphate
  modified_base 16: mod_base = OTHER; note = 2'-O-methyluridine-3'-phosphate
  modified_base 17: mod_base = OTHER; note = 2'-O-methylcytidine-3'-phosphate
  modified_base 18: mod_base = OTHER; note = 2'-O-methyladenosine-3'-phosphate
  modified_base 19: mod_base = OTHER; note = 2'-O-methyladenosine-3'-phosphorothioate
  modified_base 20: mod_base = OTHER; note = 2'-O-methyluridine-3'-phosphorothioate
  modified_base 21: mod_base = OTHER; note = 2'-O-methyladenosine
ttgtgcacgactgcgtcaata

SEQ ID NO: 418 - RNA, 23 nt, synthetic construct
  source 1..23: mol_type = other RNA
  modified_base 1: mod_base = OTHER; note = 2'-O-methyluridine-3'-phosphorothioate 5'-(E)-Vinylphosphonate
  modified_base 2: mod_base = OTHER; note = 2'-deoxy-2'-fluoroadenosine-3'-phosphorothioate
  modified_base 3: mod_base = OTHER; note = 2'-O-methyluridine-3'-phosphate
  modified_base 4: mod_base = OTHER; note = 2'-O-methyluridine-3'-phosphate
  modified_base 5: mod_base = OTHER; note = 2'-O-methylguanosine-3'-phosphate
  modified_base 6: mod_base = OTHER; note = 2'-deoxy-2'-fluoroadenosine-3'-phosphate
  modified_base 7: mod_base = OTHER; note = 2'-O-methylcytidine-3'-phosphate
  modified_base 8: mod_base = OTHER; note = 2'-deoxy-2'-fluoroguanosine-3'-phosphate
  modified_base 9: mod_base = OTHER; note = 2'-deoxy-2'-fluorocytidine-3'-phosphate
  modified_base 10: mod_base = OTHER; note = 2'-O-methyladenosine-3'-phosphate
  modified_base 11: mod_base = OTHER; note = 2'-O-methylguanosine-3'-phosphate
  modified_base 12: mod_base = OTHER; note = 2'-O-methyluridine-3'-phosphate
  modified_base 13: mod_base = OTHER; note = 2'-O-methylcytidine-3'-phosphate
  modified_base 14: mod_base = OTHER; note = 2'-deoxy-2'-fluoroguanosine-3'-phosphate
  modified_base 15: mod_base = OTHER; note = 2'-O-methyluridine-3'-phosphate
  modified_base 16: mod_base = OTHER; note = 2'-deoxy-2'-fluoroguanosine-3'-phosphate
  modified_base 17: mod_base = OTHER; note = 2'-O-methylcytidine-3'-phosphate
  modified_base 18: mod_base = OTHER; note = 2'-O-methyladenosine-3'-phosphate
  modified_base 19: mod_base = OTHER; note = 2'-O-methylcytidine-3'-phosphate
  modified_base 20: mod_base = OTHER; note = 2'-O-methyladenosine-3'-phosphate
  modified_base 21: mod_base = OTHER; note = 2'-O-methyladenosine-3'-phosphorothioate
  modified_base 22: mod_base = OTHER; note = 2'-O-methyladenosine-3'-phosphorothioate
  modified_base 23: mod_base = OTHER; note = 2'-O-methylguanosine
tattgacgcagtcgtgcacaaag

SEQ ID NO: 419 - RNA, 23 nt, synthetic construct
  source 1..23: mol_type = other RNA
ctttgtgcacgactgcgtcaata

SEQ ID NO: 420 - RNA, 21 nt, synthetic construct
  source 1..21: mol_type = other RNA
  modified_base 1: mod_base = OTHER; note = 2'-O-methylcytidine-3'-phosphorothioate
  modified_base 2: mod_base = OTHER; note = 2'-O-methyluridine-3'-phosphorothioate
  modified_base 3: mod_base = OTHER; note = 2'-O-methylguanosine-3'-phosphate
  modified_base 4: mod_base = OTHER; note = 2'-O-methylguanosine-3'-phosphate
  modified_base 5: mod_base = OTHER; note = 2'-O-methylcytidine-3'-phosphate
  modified_base 6: mod_base = OTHER; note = 2'-O-hexadecyl-uridine-3'-phosphate
  modified_base 7: mod_base = OTHER; note = 2'-deoxy-2'-fluoroadenosine-3'-phosphate
  modified_base 8: mod_base = OTHER; note = 2'-O-methylguanosine-3'-phosphate
  modified_base 9: mod_base = OTHER; note = 2'-deoxy-2'-fluoroadenosine-3'-phosphate
  modified_base 10: mod_base = OTHER; note = 2'-deoxy-2'-fluoroguanosine-3'-phosphate
  modified_base 11: mod_base = OTHER; note = 2'-deoxy-2'-fluoroguanosine-3'-phosphate
  modified_base 12: mod_base = OTHER; note = 2'-O-methyladenosine-3'-phosphate
  modified_base 13: mod_base = OTHER; note = 2'-O-methylcytidine-3'-phosphate
  modified_base 14: mod_base = OTHER; note = 2'-O-methyladenosine-3'-phosphate
  modified_base 15: mod_base = OTHER; note = 2'-O-methyluridine-3'-phosphate
  modified_base 16: mod_base = OTHER; note = 2'-O-methyladenosine-3'-phosphate
  modified_base 17: mod_base = OTHER; note = 2'-O-methyluridine-3'-phosphate
  modified_base 18: mod_base = OTHER; note = 2'-O-methyluridine-3'-phosphate
  modified_base 19: mod_base = OTHER; note = 2'-O-methylcytidine-3'-phosphorothioate
  modified_base 20: mod_base = OTHER; note = 2'-O-methyladenosine-3'-phosphorothioate
  modified_base 21: mod_base = OTHER; note = 2'-O-methyladenosine
ctggctagaggacatattcaa

SEQ ID NO: 421 - RNA, 23 nt, synthetic construct
  source 1..23: mol_type = other RNA
  modified_base 1: mod_base = OTHER; note = 2'-O-methyluridine-3'-phosphorothioate 5'-(E)-Vinylphosphonate
  modified_base 2: mod_base = OTHER; note = 2'-deoxy-2'-fluorouridine-3'-phosphorothioate
  modified_base 3: mod_base = OTHER; note = 2'-O-methylguanosine-3'-phosphate
  modified_base 4: mod_base = OTHER; note = 2'-O-methyladenosine-3'-phosphate
  modified_base 5: mod_base = OTHER; note = 2'-O-methyladenosine-3'-phosphate
  modified_base 6: mod_base = OTHER; note = 2'-deoxy-2'-fluorouridine-3'-phosphate
  modified_base 7: mod_base = OTHER; note = 2'-O-methyladenosine-3'-phosphate
  modified_base 8: mod_base = OTHER; note = 2'-deoxy-2'-fluorouridine-3'-phosphate
  modified_base 9: mod_base = OTHER; note = 2'-deoxy-2'-fluoroguanosine-3'-phosphate
  modified_base 10: mod_base = OTHER; note = 2'-O-methyluridine-3'-phosphate
  modified_base 11: mod_base = OTHER; note = 2'-O-methylcytidine-3'-phosphate
  modified_base 12: mod_base = OTHER; note = 2'-O-methylcytidine-3'-phosphate
  modified_base 13: mod_base = OTHER; note = 2'-O-methyluridine-3'-phosphate
  modified_base 14: mod_base = OTHER; note = 2'-deoxy-2'-fluorocytidine-3'-phosphate
  modified_base 15: mod_base = OTHER; note = 2'-O-methyluridine-3'-phosphate
  modified_base 16: mod_base = OTHER; note = 2'-deoxy-2'-fluoroadenosine-3'-phosphate
  modified_base 17: mod_base = OTHER; note = 2'-O-methylguanosine-3'-phosphate
  modified_base 18: mod_base = OTHER; note = 2'-O-methylcytidine-3'-phosphate
  modified_base 19: mod_base = OTHER; note = 2'-O-methylcytidine-3'-phosphate
  modified_base 20: mod_base = OTHER; note = 2'-O-methyladenosine-3'-phosphate
  modified_base 21: mod_base = OTHER; note = 2'-O-methylguanosine-3'-phosphorothioate
  modified_base 22: mod_base = OTHER; note = 2'-O-methyladenosine-3'-phosphorothioate
  modified_base 23: mod_base = OTHER; note = 2'-O-methylguanosine
ttgaatatgtcctctagccagag

SEQ ID NO: 422 - RNA, 23 nt, synthetic construct
  source 1..23: mol_type = other RNA
ctctggctagaggacatattcac

SEQ ID NO: 423 - RNA, 21 nt, synthetic construct
  source 1..21: mol_type = other RNA
  modified_base 1: mod_base = OTHER; note = 2'-O-methyluridine-3'-phosphorothioate
  modified_base 2: mod_base = OTHER; note = 2'-O-methylguanosine-3'-phosphorothioate
  modified_base 3: mod_base = OTHER; note = 2'-O-methylcytidine-3'-phosphate
  modified_base 4: mod_base = OTHER; note = 2'-O-methyladenosine-3'-phosphate
  modified_base 5: mod_base = OTHER; note = 2'-O-methylcytidine-3'-phosphate
  modified_base 6: mod_base = OTHER; note = 2'-O-hexadecyl-uridine-3'-phosphate
  modified_base 7: mod_base = OTHER; note = 2'-deoxy-2'-fluorouridine-3'-phosphate
  modified_base 8: mod_base = OTHER; note = 2'-O-methyluridine-3'-phosphate
  modified_base 9: mod_base = OTHER; note = 2'-deoxy-2'-fluoroguanosine-3'-phosphate
  modified_base 10: mod_base = OTHER; note = 2'-deoxy-2'-fluorouridine-3'-phosphate
  modified_base 11: mod_base = OTHER; note = 2'-deoxy-2'-fluoroguanosine-3'-phosphate
  modified_base 12: mod_base = OTHER; note = 2'-O-methyladenosine-3'-phosphate
  modified_base 13: mod_base = OTHER; note = 2'-O-methylguanosine-3'-phosphate
  modified_base 14: mod_base = OTHER; note = 2'-O-methyluridine-3'-phosphate
  modified_base 15: mod_base = OTHER; note = 2'-O-methyladenosine-3'-phosphate
  modified_base 16: mod_base = OTHER; note = 2'-O-methyluridine-3'-phosphate
  modified_base 17: mod_base = OTHER; note = 2'-O-methyluridine-3'-phosphate
  modified_base 18: mod_base = OTHER; note = 2'-O-methylcytidine-3'-phosphate
  modified_base 19: mod_base = OTHER; note = 2'-O-methyluridine-3'-phosphorothioate
  modified_base 20: mod_base = OTHER; note = 2'-O-methyladenosine-3'-phosphorothioate
  modified_base 21: mod_base = OTHER; note = 2'-O-methyladenosine
tgcactttgtgagtattctaa

SEQ ID NO: 424 - RNA, 23 nt, synthetic construct
  source 1..23: mol_type = other RNA
  modified_base 1: mod_base = OTHER; note = 2'-O-methyluridine-3'-phosphorothioate 5'-(E)-Vinylphosphonate
  modified_base 2: mod_base = OTHER; note = 2'-deoxy-2'-fluorouridine-3'-phosphorothioate
  modified_base 3: mod_base = OTHER; note = 2'-O-methyladenosine-3'-phosphate
  modified_base 4: mod_base = OTHER; note = 2'-O-methylguanosine-3'-phosphate
  modified_base 5: mod_base = OTHER; note = 2'-O-methyladenosine-3'-phosphate
  modified_base 6: mod_base = OTHER; note = 2'-deoxy-2'-fluoroadenosine-3'-phosphate
  modified_base 7: mod_base = OTHER; note = 2'-O-methyluridine-3'-phosphate
  modified_base 8: mod_base = OTHER; note = 2'-deoxy-2'-fluoroadenosine-3'-phosphate
  modified_base 9: mod_base = OTHER; note = 2'-deoxy-2'-fluorocytidine-3'-phosphate
  modified_base 10: mod_base = OTHER; note = 2'-O-methyluridine-3'-phosphate
  modified_base 11: mod_base = OTHER; note = 2'-O-methylcytidine-3'-phosphate
  modified_base 12: mod_base = OTHER; note = 2'-O-methyladenosine-3'-phosphate
  modified_base 13: mod_base = OTHER; note = 2'-O-methylcytidine-3'-phosphate
  modified_base 14: mod_base = OTHER; note = 2'-deoxy-2'-fluoroadenosine-3'-phosphate
  modified_base 15: mod_base = OTHER; note = 2'-O-methyladenosine-3'-phosphate
  modified_base 16: mod_base = OTHER; note = 2'-deoxy-2'-fluoroadenosine-3'-phosphate
  modified_base 17: mod_base = OTHER; note = 2'-O-methylguanosine-3'-phosphate
  modified_base 18: mod_base = OTHER; note = 2'-O-methyluridine-3'-phosphate
  modified_base 19: mod_base = OTHER; note = 2'-O-methylguanosine-3'-phosphate
  modified_base 20: mod_base = OTHER; note = 2'-O-methylcytidine-3'-phosphate
  modified_base 21: mod_base = OTHER; note = 2'-O-methyladenosine-3'-phosphorothioate
  modified_base 22: mod_base = OTHER; note = 2'-O-methyladenosine-3'-phosphorothioate
  modified_base 23: mod_base = OTHER; note = 2'-O-methylguanosine
ttagaatactcacaaagtgcaag

SEQ ID NO: 425 - RNA, 23 nt, synthetic construct
  source 1..23: mol_type = other RNA
cttgcactttgtgagtattctat

SEQ ID NO: 426 - RNA, 21 nt, synthetic construct
  source 1..21: mol_type = other RNA
  modified_base 1: mod_base = OTHER; note = 2'-O-methyladenosine-3'-phosphorothioate
  modified_base 2: mod_base = OTHER; note = 2'-O-methyluridine-3'-phosphorothioate
  modified_base 3: mod_base = OTHER; note = 2'-O-methyluridine-3'-phosphate
  modified_base 4: mod_base = OTHER; note = 2'-O-methyluridine-3'-phosphate
  modified_base 5: mod_base = OTHER; note = 2'-O-methylguanosine-3'-phosphate
  modified_base 6: mod_base = OTHER; note = 2'-O-hexadecyl-uridine-3'-phosphate
  modified_base 7: mod_base = OTHER; note = 2'-deoxy-2'-fluoroadenosine-3'-phosphate
  modified_base 8: mod_base = OTHER; note = 2'-O-methyladenosine-3'-phosphate
  modified_base 9: mod_base = OTHER; note = 2'-deoxy-2'-fluorocytidine-3'-phosphate
  modified_base 10: mod_base = OTHER; note = 2'-deoxy-2'-fluorouridine-3'-phosphate
  modified_base 11: mod_base = OTHER; note = 2'-deoxy-2'-fluorouridine-3'-phosphate
  modified_base 12: mod_base = OTHER; note = 2'-O-methyluridine-3'-phosphate
  modified_base 13: mod_base = OTHER; note = 2'-O-methylguanosine-3'-phosphate
  modified_base 14: mod_base = OTHER; note = 2'-O-methylcytidine-3'-phosphate
  modified_base 15: mod_base = OTHER; note = 2'-O-methyladenosine-3'-phosphate
  modified_base 16: mod_base = OTHER; note = 2'-O-methyluridine-3'-phosphate
  modified_base 17: mod_base = OTHER; note = 2'-O-methylguanosine-3'-phosphate
  modified_base 18: mod_base = OTHER; note = 2'-O-methyluridine-3'-phosphate
  modified_base 19: mod_base = OTHER; note = 2'-O-methyluridine-3'-phosphorothioate
  modified_base 20: mod_base = OTHER; note = 2'-O-methylcytidine-3'-phosphorothioate
  modified_base 21: mod_base = OTHER; note = 2'-O-methyladenosine
atttgtaactttgcatgttca

SEQ ID NO: 427 - RNA, 23 nt, synthetic construct
  source 1..23: mol_type = other RNA
  modified_base 1: mod_base = OTHER; note = 2'-O-methyluridine-3'-phosphorothioate 5'-(E)-Vinylphosphonate
  modified_base 2: mod_base = OTHER; note = 2'-deoxy-2'-fluoroguanosine-3'-phosphorothioate
  modified_base 3: mod_base = OTHER; note = 2'-O-methyladenosine-3'-phosphate
  modified_base 4: mod_base = OTHER; note = 2'-O-methyladenosine-3'-phosphate
  modified_base 5: mod_base = OTHER; note = 2'-O-methylcytidine-3'-phosphate
  modified_base 6: mod_base = OTHER; note = 2'-deoxy-2'-fluoroadenosine-3'-phosphate
  modified_base 7: mod_base = OTHER; note = 2'-O-methyluridine-3'-phosphate
  modified_base 8: mod_base = OTHER; note = 2'-deoxy-2'-fluoroguanosine-3'-phosphate
  modified_base 9: mod_base = OTHER; note = 2'-deoxy-2'-fluorocytidine-3'-phosphate
  modified_base 10: mod_base = OTHER; note = 2'-O-methyladenosine-3'-phosphate
  modified_base 11: mod_base = OTHER; note = 2'-O-methyladenosine-3'-phosphate
  modified_base 12: mod_base = OTHER; note = 2'-O-methyladenosine-3'-phosphate
  modified_base 13: mod_base = OTHER; note = 2'-O-methylguanosine-3'-phosphate
  modified_base 14: mod_base = OTHER; note = 2'-deoxy-2'-fluorouridine-3'-phosphate
  modified_base 15: mod_base = OTHER; note = 2'-O-methyluridine-3'-phosphate
  modified_base 16: mod_base = OTHER; note = 2'-deoxy-2'-fluoroadenosine-3'-phosphate
  modified_base 17: mod_base = OTHER; note = 2'-O-methylcytidine-3'-phosphate
  modified_base 18: mod_base = OTHER; note = 2'-O-methyladenosine-3'-phosphate
  modified_base 19: mod_base = OTHER; note = 2'-O-methyladenosine-3'-phosphate
  modified_base 20: mod_base = OTHER; note = 2'-O-methyladenosine-3'-phosphate
  modified_base 21: mod_base = OTHER; note = 2'-O-methyluridine-3'-phosphorothioate
  modified_base 22: mod_base = OTHER; note = 2'-O-methyladenosine-3'-phosphorothioate
  modified_base 23: mod_base = OTHER; note = 2'-O-methyluridine
tgaacatgcaaagttacaaatat

SEQ ID NO: 428 - RNA, 23 nt, synthetic construct
  source 1..23: mol_type = other RNA
atatttgtaactttgcatgttct

SEQ ID NO: 429 - RNA, 21 nt, synthetic construct
  source 1..21: mol_type = other RNA
  modified_base 1: mod_base = OTHER; note = 2'-O-methylcytidine-3'-phosphorothioate
  modified_base 2: mod_base = OTHER; note = 2'-O-methyladenosine-3'-phosphorothioate
  modified_base 3: mod_base = OTHER; note = 2'-O-methylcytidine-3'-phosphate
  modified_base 4: mod_base = OTHER; note = 2'-O-methyluridine-3'-phosphate
  modified_base 5: mod_base = OTHER; note = 2'-O-methylguanosine-3'-phosphate
  modified_base 6: mod_base = OTHER; note = 2'-O-hexadecyl-guanosine-3'-phosphate
  modified_base 7: mod_base = OTHER; note = 2'-deoxy-2'-fluoroadenosine-3'-phosphate
  modified_base 8: mod_base = OTHER; note = 2'-O-methyladenosine-3'-phosphate
  modified_base 9: mod_base = OTHER; note = 2'-deoxy-2'-fluoroadenosine-3'-phosphate
  modified_base 10: mod_base = OTHER; note = 2'-deoxy-2'-fluoroadenosine-3'-phosphate
  modified_base 11: mod_base = OTHER; note = 2'-deoxy-2'-fluorocytidine-3'-phosphate
  modified_base 12: mod_base = OTHER; note = 2'-O-methyladenosine-3'-phosphate
  modified_base 13: mod_base = OTHER; note = 2'-O-methyluridine-3'-phosphate
  modified_base 14: mod_base = OTHER; note = 2'-O-methyladenosine-3'-phosphate
  modified_base 15: mod_base = OTHER; note = 2'-O-methylguanosine-3'-phosphate
  modified_base 16: mod_base = OTHER; note = 2'-O-methyladenosine-3'-phosphate
  modified_base 17: mod_base = OTHER; note = 2'-O-methylguanosine-3'-phosphate
  modified_base 18: mod_base = OTHER; note = 2'-O-methyluridine-3'-phosphate
  modified_base 19: mod_base = OTHER; note = 2'-O-methyladenosine-3'-phosphorothioate
  modified_base 20: mod_base = OTHER; note = 2'-O-methylguanosine-3'-phosphorothioate
  modified_base 21: mod_base = OTHER; note = 2'-O-methyladenosine
cactggaaaacatagagtaga

SEQ ID NO: 430 - RNA, 23 nt, synthetic construct
  source 1..23: mol_type = other RNA
  modified_base 1: mod_base = OTHER; note = 2'-O-methyluridine-3'-phosphorothioate 5'-(E)-Vinylphosphonate
  modified_base 2: mod_base = OTHER; note = 2'-deoxy-2'-fluorocytidine-3'-phosphorothioate
  modified_base 3: mod_base = OTHER; note = 2'-O-methyluridine-3'-phosphate
  modified_base 4: mod_base = OTHER; note = 2'-O-methyladenosine-3'-phosphate
  modified_base 5: mod_base = OTHER; note = 2'-O-methylcytidine-3'-phosphate
  modified_base 6: mod_base = OTHER; note = 2'-deoxy-2'-fluorouridine-3'-phosphate
  modified_base 7: mod_base = OTHER; note = 2'-O-methylcytidine-3'-phosphate
  modified_base 8: mod_base = OTHER; note = 2'-deoxy-2'-fluorouridine-3'-phosphate
  modified_base 9: mod_base = OTHER; note = 2'-deoxy-2'-fluoroadenosine-3'-phosphate
  modified_base 10: mod_base = OTHER; note = 2'-O-methyluridine-3'-phosphate
  modified_base 11: mod_base = OTHER; note = 2'-O-methylguanosine-3'-phosphate
  modified_base 12: mod_base = OTHER; note = 2'-O-methyluridine-3'-phosphate
  modified_base 13: mod_base = OTHER; note = 2'-O-methyluridine-3'-phosphate
  modified_base 14: mod_base = OTHER; note = 2'-deoxy-2'-fluorouridine-3'-phosphate
  modified_base 15: mod_base = OTHER; note = 2'-O-methyluridine-3'-phosphate
  modified_base 16: mod_base = OTHER; note = 2'-deoxy-2'-fluorocytidine-3'-phosphate
  modified_base 17: mod_base = OTHER; note = 2'-O-methylcytidine-3'-phosphate
  modified_base 18: mod_base = OTHER; note = 2'-O-methyladenosine-3'-phosphate
  modified_base 19: mod_base = OTHER; note = 2'-O-methylguanosine-3'-phosphate
  modified_base 20: mod_base = OTHER; note = 2'-O-methyluridine-3'-phosphate
  modified_base 21: mod_base = OTHER; note = 2'-O-methylguanosine-3'-phosphorothioate
  modified_base 22: mod_base = OTHER; note = 2'-O-methylcytidine-3'-phosphorothioate
  modified_base 23: mod_base = OTHER; note = 2'-O-methylcytidine
tctactctatgttttccagtgcc

SEQ ID NO: 431 - RNA, 23 nt, synthetic construct
  source 1..23: mol_type = other RNA
ggcactggaaaacatagagtaga

SEQ ID NO: 432 - RNA, 21 nt, synthetic construct
  source 1..21: mol_type = other RNA
  modified_base 1: mod_base = OTHER; note = 2'-O-methyluridine-3'-phosphorothioate
  modified_base 2: mod_base = OTHER; note = 2'-O-methyluridine-3'-phosphorothioate
  modified_base 3: mod_base = OTHER; note = 2'-O-methyluridine-3'-phosphate
  modified_base 4: mod_base = OTHER; note = 2'-O-methyluridine-3'-phosphate
  modified_base 5: mod_base = OTHER; note = 2'-O-methyladenosine-3'-phosphate
  modified_base 6: mod_base = OTHER; note = 2'-O-hexadecyl-cytidine-3'-phosphate
  modified_base 7: mod_base = OTHER; note = 2'-deoxy-2'-fluorouridine-3'-phosphate
  modified_base 8: mod_base = OTHER; note = 2'-O-methyluridine-3'-phosphate
  modified_base 9: mod_base = OTHER; note = 2'-deoxy-2'-fluorouridine-3'-phosphate
  modified_base 10: mod_base = OTHER; note = 2'-deoxy-2'-fluorouridine-3'-phosphate
  modified_base 11: mod_base = OTHER; note = 2'-deoxy-2'-fluorocytidine-3'-phosphate
  modified_base 12: mod_base = OTHER; note = 2'-O-methyladenosine-3'-phosphate
  modified_base 13: mod_base = OTHER; note = 2'-O-methylcytidine-3'-phosphate
  modified_base 14: mod_base = OTHER; note = 2'-O-methyladenosine-3'-phosphate
  modified_base 15: mod_base = OTHER; note = 2'-O-methylguanosine-3'-phosphate
  modified_base 16: mod_base = OTHER; note = 2'-O-methyluridine-3'-phosphate
  modified_base 17: mod_base = OTHER; note = 2'-O-methyladenosine-3'-phosphate
  modified_base 18: mod_base = OTHER; note = 2'-O-methyluridine-3'-phosphate
  modified_base 19: mod_base = OTHER; note = 2'-O-methylguanosine-3'-phosphorothioate
  modified_base 20: mod_base = OTHER; note = 2'-O-methylguanosine-3'-phosphorothioate
  modified_base 21: mod_base = OTHER; note = 2'-O-methyladenosine
ttttacttttcacagtatgga

SEQ ID NO: 433 - RNA, 23 nt, synthetic construct
  source 1..23: mol_type = other RNA
  modified_base 1: mod_base = OTHER; note = 2'-O-methyluridine-3'-phosphorothioate 5'-(E)-Vinylphosphonate
  modified_base 2: mod_base = OTHER; note = 2'-deoxy-2'-fluorocytidine-3'-phosphorothioate
  modified_base 3: mod_base = OTHER; note = 2'-O-methylcytidine-3'-phosphate
  modified_base 4: mod_base = OTHER; note = 2'-O-methyladenosine-3'-phosphate
  modified_base 5: mod_base = OTHER; note = 2'-O-methyluridine-3'-phosphate
  modified_base 6: mod_base = OTHER; note = 2'-deoxy-2'-fluoroadenosine-3'-phosphate
  modified_base 7: mod_base = OTHER; note = 2'-O-methylcytidine-3'-phosphate
  modified_base 8: mod_base = OTHER; note = 2'-deoxy-2'-fluorouridine-3'-phosphate
  modified_base 9: mod_base = OTHER; note = 2'-deoxy-2'-fluoroguanosine-3'-phosphate
  modified_base 10: mod_base = OTHER; note = 2'-O-methyluridine-3'-phosphate
  modified_base 11: mod_base = OTHER; note = 2'-O-methylguanosine-3'-phosphate
  modified_base 12: mod_base = OTHER; note = 2'-O-methyladenosine-3'-phosphate
  modified_base 13: mod_base = OTHER; note = 2'-O-methyladenosine-3'-phosphate
  modified_base 14: mod_base = OTHER; note = 2'-deoxy-2'-fluoroadenosine-3'-phosphate
  modified_base 15: mod_base = OTHER; note = 2'-O-methyladenosine-3'-phosphate
  modified_base 16: mod_base = OTHER; note = 2'-deoxy-2'-fluoroguanosine-3'-phosphate
  modified_base 17: mod_base = OTHER; note = 2'-O-methyluridine-3'-phosphate
  modified_base 18: mod_base = OTHER; note = 2'-O-methyladenosine-3'-phosphate
  modified_base 19: mod_base = OTHER; note = 2'-O-methyladenosine-3'-phosphate
  modified_base 20: mod_base = OTHER; note = 2'-O-methyladenosine-3'-phosphate
  modified_base 21: mod_base = OTHER; note = 2'-O-methyladenosine-3'-phosphorothioate
  modified_base 22: mod_base = OTHER; note = 2'-O-methylcytidine-3'-phosphorothioate
  modified_base 23: mod_base = OTHER; note = 2'-O-methyladenosine
tccatactgtgaaaagtaaaaca

SEQ ID NO: 434 - RNA, 23 nt, synthetic construct
  source 1..23: mol_type = other RNA
tgttttacttttcacagtatggg

SEQ ID NO: 435 - RNA, 21 nt, synthetic construct
  source 1..21: mol_type = other RNA
  modified_base 1: mod_base = OTHER; note = 2'-O-methyluridine-3'-phosphorothioate
  modified_base 2: mod_base = OTHER; note = 2'-O-methylguanosine-3'-phosphorothioate
  modified_base 3: mod_base = OTHER; note = 2'-O-methylguanosine-3'-phosphate
  modified_base 4: mod_base = OTHER; note = 2'-O-methylcytidine-3'-phosphate
  modified_base 5: mod_base = OTHER; note = 2'-O-methyladenosine-3'-phosphate
  modified_base 6: mod_base = OTHER; note = 2'-O-hexadecyl-uridine-3'-phosphate
  modified_base 7: mod_base = OTHER; note = 2'-deoxy-2'-fluorouridine-3'-phosphate
  modified_base 8: mod_base = OTHER; note = 2'-O-methylcytidine-3'-phosphate
  modified_base 9: mod_base = OTHER; note = 2'-deoxy-2'-fluorocytidine-3'-phosphate
  modified_base 10: mod_base = OTHER; note = 2'-deoxy-2'-fluorouridine-3'-phosphate
  modified_base 11: mod_base = OTHER; note = 2'-deoxy-2'-fluorouridine-3'-phosphate
  modified_base 12: mod_base = OTHER; note = 2'-O-methyluridine-3'-phosphate
  modified_base 13: mod_base = OTHER; note = 2'-O-methylcytidine-3'-phosphate
  modified_base 14: mod_base = OTHER; note = 2'-O-methyluridine-3'-phosphate
  modified_base 15: mod_base = OTHER; note = 2'-O-methyluridine-3'-phosphate
  modified_base 16: mod_base = OTHER; note = 2'-O-methyluridine-3'-phosphate
  modified_base 17: mod_base = OTHER; note = 2'-O-methyladenosine-3'-phosphate
  modified_base 18: mod_base = OTHER; note = 2'-O-methyladenosine-3'-phosphate
  modified_base 19: mod_base = OTHER; note = 2'-O-methyladenosine-3'-phosphorothioate
  modified_base 20: mod_base = OTHER; note = 2'-O-methylcytidine-3'-phosphorothioate
  modified_base 21: mod_base = OTHER; note = 2'-O-methyladenosine
tggcattcctttctttaaaca

SEQ ID NO: 436 - RNA, 23 nt, synthetic construct
  source 1..23: mol_type = other RNA
  modified_base 1: mod_base = OTHER; note = 2'-O-methyluridine-3'-phosphorothioate 5'-(E)-Vinylphosphonate
  modified_base 2: mod_base = OTHER; note = 2'-deoxy-2'-fluoroguanosine-3'-phosphorothioate
  modified_base 3: mod_base = OTHER; note = 2'-O-methyluridine-3'-phosphate
  modified_base 4: mod_base = OTHER; note = 2'-O-methyluridine-3'-phosphate
  modified_base 5: mod_base = OTHER; note = 2'-O-methyluridine-3'-phosphate
  modified_base 6: mod_base = OTHER; note = 2'-deoxy-2'-fluoroadenosine-3'-phosphate
  modified_base 7: mod_base = OTHER; note = 2'-O-methyladenosine-3'-phosphate
  modified_base 8: mod_base = OTHER; note = 2'-deoxy-2'-fluoroadenosine-3'-phosphate
  modified_base 9: mod_base = OTHER; note = 2'-deoxy-2'-fluoroguanosine-3'-phosphate
  modified_base 10: mod_base = OTHER; note = 2'-O-methyladenosine-3'-phosphate
  modified_base 11: mod_base = OTHER; note = 2'-O-methyladenosine-3'-phosphate
  modified_base 12: mod_base = OTHER; note = 2'-O-methyladenosine-3'-phosphate
  modified_base 13: mod_base = OTHER; note = 2'-O-methylguanosine-3'-phosphate
  modified_base 14: mod_base = OTHER; note = 2'-deoxy-2'-fluoroguanosine-3'-phosphate
  modified_base 15: mod_base = OTHER; note = 2'-O-methyladenosine-3'-phosphate
  modified_base 16: mod_base = OTHER; note = 2'-deoxy-2'-fluoroadenosine-3'-phosphate
  modified_base 17: mod_base = OTHER; note = 2'-O-methyluridine-3'-phosphate
  modified_base 18: mod_base = OTHER; note = 2'-O-methylguanosine-3'-phosphate
  modified_base 19: mod_base = OTHER; note = 2'-O-methylcytidine-3'-phosphate
  modified_base 20: mod_base = OTHER; note = 2'-O-methylcytidine-3'-phosphate
  modified_base 21: mod_base = OTHER; note = 2'-O-methyladenosine-3'-phosphorothioate
  modified_base 22: mod_base = OTHER; note = 2'-O-methylcytidine-3'-phosphorothioate
  modified_base 23: mod_base = OTHER; note = 2'-O-methyladenosine
tgtttaaagaaaggaatgccaca

SEQ ID NO: 437 - RNA, 23 nt, synthetic construct
  source 1..23: mol_type = other RNA
tgtggcattcctttctttaaact

SEQ ID NO: 438 - RNA, 21 nt, synthetic construct
  source 1..21: mol_type = other RNA
  modified_base 1: mod_base = OTHER; note = 2'-O-methylguanosine-3'-phosphorothioate
  modified_base 2: mod_base = OTHER; note = 2'-O-methylguanosine-3'-phosphorothioate
  modified_base 3: mod_base = OTHER; note = 2'-O-methyladenosine-3'-phosphate
  modified_base 4: mod_base = OTHER; note = 2'-O-methylguanosine-3'-phosphate
  modified_base 5: mod_base = OTHER; note = 2'-O-methyladenosine-3'-phosphate
  modified_base 6: mod_base = OTHER; note = 2'-O-hexadecyl-adenosine-3'-phosphate
  modified_base 7: mod_base = OTHER; note = 2'-deoxy-2'-fluorocytidine-3'-phosphate
  modified_base 8: mod_base = OTHER; note = 2'-O-methyluridine-3'-phosphate
  modified_base 9: mod_base = OTHER; note = 2'-deoxy-2'-fluorouridine-3'-phosphate
  modified_base 10: mod_base = OTHER; note = 2'-deoxy-2'-fluorocytidine-3'-phosphate
  modified_base 11: mod_base = OTHER; note = 2'-deoxy-2'-fluoroadenosine-3'-phosphate
  modified_base 12: mod_base = OTHER; note = 2'-O-methylcytidine-3'-phosphate
  modified_base 13: mod_base = OTHER; note = 2'-O-methylcytidine-3'-phosphate
  modified_base 14: mod_base = OTHER; note = 2'-O-methylguanosine-3'-phosphate
  modified_base 15: mod_base = OTHER; note = 2'-O-methyladenosine-3'-phosphate
  modified_base 16: mod_base = OTHER; note = 2'-O-methylguanosine-3'-phosphate
  modified_base 17: mod_base = OTHER; note = 2'-O-methyladenosine-3'-phosphate
  modified_base 18: mod_base = OTHER; note = 2'-O-methylcytidine-3'-phosphate
  modified_base 19: mod_base = OTHER; note = 2'-O-methylcytidine-3'-phosphorothioate
  modified_base 20: mod_base = OTHER; note = 2'-O-methylguanosine-3'-phosphorothioate
  modified_base 21: mod_base = OTHER; note = 2'-O-methyladenosine
ggagaacttcaccgagaccga

SEQ ID NO: 439 - RNA, 23 nt, synthetic construct
  source 1..23: mol_type = other RNA
  modified_base 1: mod_base = OTHER; note = 2'-O-methyluridine-3'-phosphorothioate 5'-(E)-Vinylphosphonate
  modified_base 2: mod_base = OTHER; note = 2'-deoxy-2'-fluorocytidine-3'-phosphorothioate
  modified_base 3: mod_base = OTHER; note = 2'-O-methylguanosine-3'-phosphate
  modified_base 4: mod_base = OTHER; note = 2'-O-methylguanosine-3'-phosphate
  modified_base 5: mod_base = OTHER; note = 2'-O-methyluridine-3'-phosphate
  modified_base 6: mod_base = OTHER; note = 2'-deoxy-2'-fluorocytidine-3'-phosphate
  modified_base 7: mod_base = OTHER; note = 2'-O-methyluridine-3'-phosphate
  modified_base 8: mod_base = OTHER; note = 2'-deoxy-2'-fluorocytidine-3'-phosphate
  modified_base 9: mod_base = OTHER; note = 2'-deoxy-2'-fluoroguanosine-3'-phosphate
  modified_base 10: mod_base = OTHER; note = 2'-O-methylguanosine-3'-phosphate
  modified_base 11: mod_base = OTHER; note = 2'-O-methyluridine-3'-phosphate
  modified_base 12: mod_base = OTHER; note = 2'-O-methylguanosine-3'-phosphate
  modified_base 13: mod_base = OTHER; note = 2'-O-methyladenosine-3'-phosphate
  modified_base 14: mod_base = OTHER; note = 2'-deoxy-2'-fluoroadenosine-3'-phosphate
  modified_base 15: mod_base = OTHER; note = 2'-O-methylguanosine-3'-phosphate
  modified_base 16: mod_base = OTHER; note = 2'-deoxy-2'-fluorouridine-3'-phosphate
  modified_base 17: mod_base = OTHER; note = 2'-O-methyluridine-3'-phosphate
  modified_base 18: mod_base = OTHER; note = 2'-O-methylcytidine-3'-phosphate
  modified_base 19: mod_base = OTHER; note = 2'-O-methyluridine-3'-phosphate
  modified_base 20: mod_base = OTHER; note = 2'-O-methylcytidine-3'-phosphate
  modified_base 21: mod_base = OTHER; note = 2'-O-methylcytidine-3'-phosphorothioate
  modified_base 22: mod_base = OTHER; note = 2'-O-methylcytidine-3'-phosphorothioate
  modified_base 23: mod_base = OTHER; note = 2'-O-methylcytidine
tcggtctcggtgaagttctcccc

SEQ ID NO: 440 - RNA, 23 nt, synthetic construct
  source 1..23: mol_type = other RNA
ggggagaacttcaccgagaccga

SEQ ID NO: 441 - RNA, 21 nt, synthetic construct
  source 1..21: mol_type = other RNA
  modified_base 1: mod_base = OTHER; note = 2'-O-methyladenosine-3'-phosphorothioate
  modified_base 2: mod_base = OTHER; note = 2'-O-methyladenosine-3'-phosphorothioate
  modified_base 3: mod_base = OTHER; note = 2'-O-methylcytidine-3'-phosphate
  modified_base 4: mod_base = OTHER; note = 2'-O-methyladenosine-3'-phosphate
  modified_base 5: mod_base = OTHER; note = 2'-O-methyluridine-3'-phosphate
  modified_base 6: mod_base = OTHER; note = 2'-O-hexadecyl-cytidine-3'-phosphate
  modified_base 7: mod_base = OTHER; note = 2'-deoxy-2'-fluorouridine-3'-phosphate
  modified_base 8: mod_base = OTHER; note = 2'-O-methylguanosine-3'-phosphate
  modified_base 9: mod_base = OTHER; note = 2'-deoxy-2'-fluoroadenosine-3'-phosphate
  modified_base 10: mod_base = OTHER; note = 2'-deoxy-2'-fluoroadenosine-3'-phosphate
  modified_base 11: mod_base = OTHER; note = 2'-deoxy-2'-fluoroguanosine-3'-phosphate
  modified_base 12: mod_base = OTHER; note = 2'-O-methyluridine-3'-phosphate
  modified_base 13: mod_base = OTHER; note = 2'-O-methylguanosine-3'-phosphate
  modified_base 14: mod_base = OTHER; note = 2'-O-methyluridine-3'-phosphate
  modified_base 15: mod_base = OTHER; note = 2'-O-methylcytidine-3'-phosphate
  modified_base 16: mod_base = OTHER; note = 2'-O-methyluridine-3'-phosphate
  modified_base 17: mod_base = OTHER; note = 2'-O-methyladenosine-3'-phosphate
  modified_base 18: mod_base = OTHER; note = 2'-O-methyladenosine-3'-phosphate
  modified_base 19: mod_base = OTHER; note = 2'-O-methyluridine-3'-phosphorothioate
  modified_base 20: mod_base = OTHER; note = 2'-O-methylguanosine-3'-phosphorothioate
  modified_base 21: mod_base = OTHER; note = 2'-O-methyladenosine
aacatctgaagtgtctaatga

SEQ ID NO: 442 - RNA, 23 nt, synthetic construct
  source 1..23: mol_type = other RNA
  modified_base 1: mod_base = OTHER; note = 2'-O-methyluridine-3'-phosphorothioate 5'-(E)-Vinylphosphonate
  modified_base 2: mod_base = OTHER; note = 2'-deoxy-2'-fluorocytidine-3'-phosphorothioate
  modified_base 3: mod_base = OTHER; note = 2'-O-methyladenosine-3'-phosphate
  modified_base 4: mod_base = OTHER; note = 2'-O-methyluridine-3'-phosphate
  modified_base 5: mod_base = OTHER; note = 2'-O-methyluridine-3'-phosphate
  modified_base 6: mod_base = OTHER; note = 2'-deoxy-2'-fluoroadenosine-3'-phosphate
  modified_base 7: mod_base = OTHER; note = 2'-O-methylguanosine-3'-phosphate
  modified_base 8: mod_base = OTHER; note = 2'-deoxy-2'-fluoroadenosine-3'-phosphate
  modified_base 9: mod_base = OTHER; note = 2'-deoxy-2'-fluorocytidine-3'-phosphate
  modified_base 10: mod_base = OTHER; note = 2'-O-methyladenosine-3'-phosphate
  modified_base 11: mod_base = OTHER; note = 2'-O-methylcytidine-3'-phosphate
  modified_base 12: mod_base = OTHER; note = 2'-O-methyluridine-3'-phosphate
  modified_base 13: mod_base = OTHER; note = 2'-O-methyluridine-3'-phosphate
  modified_base 14: mod_base = OTHER; note = 2'-deoxy-2'-fluorocytidine-3'-phosphate
  modified_base 15: mod_base = OTHER; note = 2'-O-methyladenosine-3'-phosphate
  modified_base 16: mod_base = OTHER; note = 2'-deoxy-2'-fluoroguanosine-3'-phosphate
  modified_base 17: mod_base = OTHER; note = 2'-O-methyladenosine-3'-phosphate
  modified_base 18: mod_base = OTHER; note = 2'-O-methyluridine-3'-phosphate
  modified_base 19: mod_base = OTHER; note = 2'-O-methylguanosine-3'-phosphate
  modified_base 20: mod_base = OTHER; note = 2'-O-methyluridine-3'-phosphate
  modified_base 21: mod_base = OTHER; note = 2'-O-methyluridine-3'-phosphorothioate
  modified_base 22: mod_base = OTHER; note = 2'-O-methyladenosine-3'-phosphorothioate
  modified_base 23: mod_base = OTHER; note = 2'-O-methyladenosine
tcattagacacttcagatgttaa

SEQ ID NO: 443 - RNA, 23 nt, synthetic construct
  source 1..23: mol_type = other RNA
ttaacatctgaagtgtctaatgc

SEQ ID NO: 444 - RNA, 21 nt, synthetic construct
  source 1..21: mol_type = other RNA
  modified_base 1: mod_base = OTHER; note = 2'-O-methyladenosine-3'-phosphorothioate
  modified_base 2: mod_base = OTHER; note = 2'-O-methylcytidine-3'-phosphorothioate
  modified_base 3: mod_base = OTHER; note = 2'-O-methylcytidine-3'-phosphate
  modified_base 4: mod_base = OTHER; note = 2'-O-methyladenosine-3'-phosphate
  modified_base 5: mod_base = OTHER; note = 2'-O-methylguanosine-3'-phosphate
  modified_base 6: mod_base = OTHER; note = 2'-O-hexadecyl-adenosine-3'-phosphate
  modified_base 7: mod_base = OTHER; note = 2'-deoxy-2'-fluoroadenosine-3'-phosphate
  modified_base 8: mod_base = OTHER; note = 2'-O-methyluridine-3'-phosphate
  modified_base 9: mod_base = OTHER; note = 2'-deoxy-2'-fluorouridine-3'-phosphate
  modified_base 10: mod_base = OTHER; note = 2'-deoxy-2'-fluoroadenosine-3'-phosphate
  modified_base 11: mod_base = OTHER; note = 2'-deoxy-2'-fluoroguanosine-3'-phosphate
  modified_base 12: mod_base = OTHER; note = 2'-O-methylguanosine-3'-phosphate
  modified_base 13: mod_base = OTHER; note = 2'-O-methyluridine-3'-phosphate
  modified_base 14: mod_base = OTHER; note = 2'-O-methylcytidine-3'-phosphate
  modified_base 15: mod_base = OTHER; note = 2'-O-methyladenosine-3'-phosphate
  modified_base 16: mod_base = OTHER; note = 2'-O-methyladenosine-3'-phosphate
  modified_base 17: mod_base = OTHER; note = 2'-O-methylguanosine-3'-phosphate
  modified_base 18: mod_base = OTHER; note = 2'-O-methyluridine-3'-phosphate
  modified_base 19: mod_base = OTHER; note = 2'-O-methyluridine-3'-phosphorothioate
  modified_base 20: mod_base = OTHER; note = 2'-O-methylcytidine-3'-phosphorothioate
  modified_base 21: mod_base = OTHER; note = 2'-O-methyladenosine
accagaattaggtcaagttca

SEQ ID NO: 445 - RNA, 23 nt, synthetic construct
  source 1..23: mol_type = other RNA
  modified_base 1: mod_base = OTHER; note = 2'-O-methyluridine-3'-phosphorothioate 5'-(E)-Vinylphosphonate
  modified_base 2: mod_base = OTHER; note = 2'-deoxy-2'-fluoroguanosine-3'-phosphorothioate
  modified_base 3: mod_base = OTHER; note = 2'-O-methyladenosine-3'-phosphate
  modified_base 4: mod_base = OTHER; note = 2'-O-methyladenosine-3'-phosphate
  modified_base 5: mod_base = OTHER; note = 2'-O-methylcytidine-3'-phosphate
  modified_base 6: mod_base = OTHER; note = 2'-deoxy-2'-fluorouridine-3'-phosphate
  modified_base 7: mod_base = OTHER; note = 2'-O-methyluridine-3'-phosphate
  modified_base 8: mod_base = OTHER; note = 2'-deoxy-2'-fluoroguanosine-3'-phosphate
  modified_base 9: mod_base = OTHER; note = 2'-deoxy-2'-fluoroadenosine-3'-phosphate
  modified_base 10: mod_base = OTHER; note = 2'-O-methylcytidine-3'-phosphate
  modified_base 11: mod_base = OTHER; note = 2'-O-methylcytidine-3'-phosphate
  modified_base 12: mod_base = OTHER; note = 2'-O-methyluridine-3'-phosphate
  modified_base 13: mod_base = OTHER; note = 2'-O-methyladenosine-3'-phosphate
  modified_base 14: mod_base = OTHER; note = 2'-deoxy-2'-fluoroadenosine-3'-phosphate
  modified_base 15: mod_base = OTHER; note = 2'-O-methyluridine-3'-phosphate
  modified_base 16: mod_base = OTHER; note = 2'-deoxy-2'-fluorouridine-3'-phosphate
  modified_base 17: mod_base = OTHER; note = 2'-O-methylcytidine-3'-phosphate
  modified_base 18: mod_base = OTHER; note = 2'-O-methyluridine-3'-phosphate
  modified_base 19: mod_base = OTHER; note = 2'-O-methylguanosine-3'-phosphate
  modified_base 20: mod_base = OTHER; note = 2'-O-methylguanosine-3'-phosphate
  modified_base 21: mod_base = OTHER; note = 2'-O-methyluridine-3'-phosphorothioate
  modified_base 22: mod_base = OTHER; note = 2'-O-methyluridine-3'-phosphorothioate
  modified_base 23: mod_base = OTHER; note = 2'-O-methyluridine
tgaacttgacctaattctggttt

SEQ ID NO: 446 - RNA, 23 nt, synthetic construct
  source 1..23: mol_type = other RNA
aaaccagaattaggtcaagttca

SEQ ID NO: 447 - RNA, 21 nt, synthetic construct
  source 1..21: mol_type = other RNA
  modified_base 1: mod_base = OTHER; note = 2'-O-methylcytidine-3'-phosphorothioate
  modified_base 2: mod_base = OTHER; note = 2'-O-methyluridine-3'-phosphorothioate
  modified_base 3: mod_base = OTHER; note = 2'-O-methyladenosine-3'-phosphate
  modified_base 4: mod_base = OTHER; note = 2'-O-methyluridine-3'-phosphate
  modified_base 5: mod_base = OTHER; note = 2'-O-methyladenosine-3'-phosphate
  modified_base 6: mod_base = OTHER; note = 2'-O-hexadecyl-uridine-3'-phosphate
  modified_base 7: mod_base = OTHER; note = 2'-deoxy-2'-fluorouridine-3'-phosphate
  modified_base 8: mod_base = OTHER; note = 2'-O-methyluridine-3'-phosphate
  modified_base 9: mod_base = OTHER; note = 2'-deoxy-2'-fluoroguanosine-3'-phosphate
  modified_base 10: mod_base = OTHER; note = 2'-deoxy-2'-fluorouridine-3'-phosphate
  modified_base 11: mod_base = OTHER; note = 2'-deoxy-2'-fluoroadenosine-3'-phosphate
  modified_base 12: mod_base = OTHER; note = 2'-O-methyladenosine-3'-phosphate
  modified_base 13: mod_base = OTHER; note = 2'-O-methylcytidine-3'-phosphate
  modified_base 14: mod_base = OTHER; note = 2'-O-methyluridine-3'-phosphate
  modified_base 15: mod_base = OTHER; note = 2'-O-methyluridine-3'-phosphate
  modified_base 16: mod_base = OTHER; note = 2'-O-methyluridine-3'-phosphate
  modified_base 17: mod_base = OTHER; note = 2'-O-methylguanosine-3'-phosphate
  modified_base 18: mod_base = OTHER; note = 2'-O-methylcytidine-3'-phosphate
  modified_base 19: mod_base = OTHER; note = 2'-O-methyladenosine-3'-phosphorothioate
  modified_base 20: mod_base = OTHER; note = 2'-O-methyluridine-3'-phosphorothioate
  modified_base 21: mod_base = OTHER; note = 2'-O-methyladenosine
ctatatttgtaactttgcata

SEQ ID NO: 448 - RNA, 23 nt, synthetic construct
  source 1..23: mol_type = other RNA
  modified_base 1: mod_base = OTHER; note = 2'-O-methyluridine-3'-phosphorothioate 5'-(E)-Vinylphosphonate
  modified_base 2: mod_base = OTHER; note = 2'-deoxy-2'-fluoroadenosine-3'-phosphorothioate
  modified_base 3: mod_base = OTHER; note = 2'-O-methyluridine-3'-phosphate
  modified_base 4: mod_base = OTHER; note = 2'-O-methylguanosine-3'-phosphate
  modified_base 5: mod_base = OTHER; note = 2'-O-methylcytidine-3'-phosphate
  modified_base 6: mod_base = OTHER; note = 2'-deoxy-2'-fluoroadenosine-3'-phosphate
  modified_base 7: mod_base = OTHER; note = 2'-O-methyladenosine-3'-phosphate
  modified_base 8: mod_base = OTHER; note = 2'-deoxy-2'-fluoroadenosine-3'-phosphate
  modified_base 9: mod_base = OTHER; note = 2'-deoxy-2'-fluoroguanosine-3'-phosphate
  modified_base 10: mod_base = OTHER; note = 2'-O-methyluridine-3'-phosphate
  modified_base 11: mod_base = OTHER; note = 2'-O-methyluridine-3'-phosphate
  modified_base 12: mod_base = OTHER; note = 2'-O-methyladenosine-3'-phosphate
  modified_base 13: mod_base = OTHER; note = 2'-O-methylcytidine-3'-phosphate
  modified_base 14: mod_base = OTHER; note = 2'-deoxy-2'-fluoroadenosine-3'-phosphate
  modified_base 15: mod_base = OTHER; note = 2'-O-methyladenosine-3'-phosphate
  modified_base 16: mod_base = OTHER; note = 2'-deoxy-2'-fluoroadenosine-3'-phosphate
  modified_base 17: mod_base = OTHER; note = 2'-O-methyluridine-3'-phosphate
  modified_base 18: mod_base = OTHER; note = 2'-O-methyladenosine-3'-phosphate
  modified_base 19: mod_base = OTHER; note = 2'-O-methyluridine-3'-phosphate
  modified_base 20: mod_base = OTHER; note = 2'-O-methyladenosine-3'-phosphate
  modified_base 21: mod_base = OTHER; note = 2'-O-methylguanosine-3'-phosphorothioate
  modified_base 22: mod_base = OTHER; note = 2'-O-methyladenosine-3'-phosphorothioate
  modified_base 23: mod_base = OTHER; note = 2'-O-methyladenosine
tatgcaaagttacaaatatagaa

SEQ ID NO: 449 - RNA, 23 nt, synthetic construct
  source 1..23: mol_type = other RNA
ttctatatttgtaactttgcatg

SEQ ID NO: 450 - RNA, 21 nt, synthetic construct
  source 1..21: mol_type = other RNA
  modified_base 1: mod_base = OTHER; note = 2'-O-methyladenosine-3'-phosphorothioate
  modified_base 2: mod_base = OTHER; note = 2'-O-methyluridine-3'-phosphorothioate
  modified_base 3: mod_base = OTHER; note = 2'-O-methyladenosine-3'-phosphate
  modified_base 4: mod_base = OTHER; note = 2'-O-methyluridine-3'-phosphate
  modified_base 5: mod_base = OTHER; note = 2'-O-methyluridine-3'-phosphate
  modified_base 6: mod_base = OTHER; note = 2'-O-hexadecyl-uridine-3'-phosphate
  modified_base 7: mod_base = OTHER; note = 2'-deoxy-2'-fluoroguanosine-3'-phosphate
  modified_base 8: mod_base = OTHER; note = 2'-O-methyluridine-3'-phosphate
  modified_base 9: mod_base = OTHER; note = 2'-deoxy-2'-fluoroadenosine-3'-phosphate
  modified_base 10: mod_base = OTHER; note = 2'-deoxy-2'-fluoroadenosine-3'-phosphate
  modified_base 11: mod_base = OTHER; note = 2'-deoxy-2'-fluorocytidine-3'-phosphate
  modified_base 12: mod_base = OTHER; note = 2'-O-methyluridine-3'-phosphate
  modified_base 13: mod_base = OTHER; note = 2'-O-methyluridine-3'-phosphate
  modified_base 14: mod_base = OTHER; note = 2'-O-methyluridine-3'-phosphate
  modified_base 15: mod_base = OTHER; note = 2'-O-methylguanosine-3'-phosphate
  modified_base 16: mod_base = OTHER; note = 2'-O-methylcytidine-3'-phosphate
  modified_base 17: mod_base = OTHER; note = 2'-O-methyladenosine-3'-phosphate
  modified_base 18: mod_base = OTHER; note = 2'-O-methyluridine-3'-phosphate
  modified_base 19: mod_base = OTHER; note = 2'-O-methylguanosine-3'-phosphorothioate
  modified_base 20: mod_base = OTHER; note = 2'-O-methyluridine-3'-phosphorothioate
  modified_base 21: mod_base = OTHER; note = 2'-O-methyladenosine
atatttgtaactttgcatgta

SEQ ID NO: 451 - RNA, 23 nt, synthetic construct
  source 1..23: mol_type = other RNA
  modified_base 1: mod_base = OTHER; note = 2'-O-methyluridine-3'-phosphorothioate 5'-(E)-Vinylphosphonate
  modified_base 2: mod_base = OTHER; note = 2'-deoxy-2'-fluoroadenosine-3'-phosphorothioate
  modified_base 3: mod_base = OTHER; note = 2'-O-methylcytidine-3'-phosphate
  modified_base 4: mod_base = OTHER; note = 2'-O-methyladenosine-3'-phosphate
  modified_base 5: mod_base = OTHER; note = 2'-O-methyluridine-3'-phosphate
  modified_base 6: mod_base = OTHER; note = 2'-deoxy-2'-fluoroguanosine-3'-phosphate
  modified_base 7: mod_base = OTHER; note = 2'-O-methylcytidine-3'-phosphate
  modified_base 8: mod_base = OTHER; note = 2'-deoxy-2'-fluoroadenosine-3'-phosphate
  modified_base 9: mod_base = OTHER; note = 2'-deoxy-2'-fluoroadenosine-3'-phosphate
  modified_base 10: mod_base = OTHER; note = 2'-O-methyladenosine-3'-phosphate
  modified_base 11: mod_base = OTHER; note = 2'-O-methylguanosine-3'-phosphate
  modified_base 12: mod_base = OTHER; note = 2'-O-methyluridine-3'-phosphate
  modified_base 13: mod_base = OTHER; note = 2'-O-methyluridine-3'-phosphate
  modified_base 14: mod_base = OTHER; note = 2'-deoxy-2'-fluoroadenosine-3'-phosphate
  modified_base 15: mod_base = OTHER; note = 2'-O-methylcytidine-3'-phosphate
  modified_base 16: mod_base = OTHER; note = 2'-deoxy-2'-fluoroadenosine-3'-phosphate
  modified_base 17: mod_base = OTHER; note = 2'-O-methyladenosine-3'-phosphate
  modified_base 18: mod_base = OTHER; note = 2'-O-methyladenosine-3'-phosphate
  modified_base 19: mod_base = OTHER; note = 2'-O-methyluridine-3'-phosphate
  modified_base 20: mod_base = OTHER; note = 2'-O-methyladenosine-3'-phosphate
  modified_base 21: mod_base = OTHER; note = 2'-O-methyluridine-3'-phosphorothioate
  modified_base 22: mod_base = OTHER; note = 2'-O-methyladenosine-3'-phosphorothioate
  modified_base 23: mod_base = OTHER; note = 2'-O-methylguanosine
tacatgcaaagttacaaatatag

SEQ ID NO: 452 - RNA, 23 nt, synthetic construct
  source 1..23: mol_type = other RNA
ctatatttgtaactttgcatgtt

SEQ ID NO: 453 - RNA, 21 nt, synthetic construct
  source 1..21: mol_type = other RNA
  modified_base 1: mod_base = OTHER; note = 2'-O-methylguanosine-3'-phosphorothioate
  modified_base 2: mod_base = OTHER; note = 2'-O-methyluridine-3'-phosphorothioate
  modified_base 3: mod_base = OTHER; note = 2'-O-methylcytidine-3'-phosphate
  modified_base 4: mod_base = OTHER; note = 2'-O-methylcytidine-3'-phosphate
  modified_base 5: mod_base = OTHER; note = 2'-O-methyluridine-3'-phosphate
  modified_base 6: mod_base = OTHER; note = 2'-O-hexadecyl-uridine-3'-phosphate
  modified_base 7: mod_base = OTHER; note = 2'-deoxy-2'-fluoroadenosine-3'-phosphate
  modified_base 8: mod_base = OTHER; note = 2'-O-methylguanosine-3'-phosphate
  modified_base 9: mod_base = OTHER; note = 2'-deoxy-2'-fluoroguanosine-3'-phosphate
  modified_base 10: mod_base = OTHER; note = 2'-deoxy-2'-fluorocytidine-3'-phosphate
  modified_base 11: mod_base = OTHER; note = 2'-deoxy-2'-fluorouridine-3'-phosphate
  modified_base 12: mod_base = OTHER; note = 2'-O-methyluridine-3'-phosphate
  modified_base 13: mod_base = OTHER; note = 2'-O-methyladenosine-3'-phosphate
  modified_base 14: mod_base = OTHER; note = 2'-O-methylcytidine-3'-phosphate
  modified_base 15: mod_base = OTHER; note = 2'-O-methyladenosine-3'-phosphate
  modified_base 16: mod_base = OTHER; note = 2'-O-methyladenosine-3'-phosphate
  modified_base 17: mod_base = OTHER; note = 2'-O-methyluridine-3'-phosphate
  modified_base 18: mod_base = OTHER; note = 2'-O-methylguanosine-3'-phosphate
  modified_base 19: mod_base = OTHER; note = 2'-O-methyluridine-3'-phosphorothioate
  modified_base 20: mod_base = OTHER; note = 2'-O-methylguanosine-3'-phosphorothioate
  modified_base 21: mod_base = OTHER; note = 2'-O-methyladenosine
gtccttaggcttacaatgtga

SEQ ID NO: 454 - RNA, 23 nt, synthetic construct
  source 1..23: mol_type = other RNA
  modified_base 1: mod_base = OTHER; note = 2'-O-methyluridine-3'-phosphorothioate 5'-(E)-Vinylphosphonate
  modified_base 2: mod_base = OTHER; note = 2'-deoxy-2'-fluorocytidine-3'-phosphorothioate
  modified_base 3: mod_base = OTHER; note = 2'-O-methyladenosine-3'-phosphate
  modified_base 4: mod_base = OTHER; note = 2'-O-methylcytidine-3'-phosphate
  modified_base 5: mod_base = OTHER; note = 2'-O-methyladenosine-3'-phosphate
  modified_base 6: mod_base = OTHER; note = 2'-deoxy-2'-fluorouridine-3'-phosphate
  modified_base 7: mod_base = OTHER; note = 2'-O-methyluridine-3'-phosphate
  modified_base 8: mod_base = OTHER; note = 2'-deoxy-2'-fluoroguanosine-3'-phosphate
  modified_base 9: mod_base = OTHER; note = 2'-deoxy-2'-fluorouridine-3'-phosphate
  modified_base 10: mod_base = OTHER; note = 2'-O-methyladenosine-3'-phosphate
  modified_base 11: mod_base = OTHER; note = 2'-O-methyladenosine-3'-phosphate
  modified_base 12: mod_base = OTHER; note = 2'-O-methylguanosine-3'-phosphate
  modified_base 13: mod_base = OTHER; note = 2'-O-methylcytidine-3'-phosphate
  modified_base 14: mod_base = OTHER; note = 2'-deoxy-2'-fluorocytidine-3'-phosphate
  modified_base 15: mod_base = OTHER; note = 2'-O-methyluridine-3'-phosphate
  modified_base 16: mod_base = OTHER; note = 2'-deoxy-2'-fluoroadenosine-3'-phosphate
  modified_base 17: mod_base = OTHER; note = 2'-O-methyladenosine-3'-phosphate
  modified_base 18: mod_base = OTHER; note = 2'-O-methylguanosine-3'-phosphate
  modified_base 19: mod_base = OTHER; note = 2'-O-methylguanosine-3'-phosphate
  modified_base 20: mod_base = OTHER; note = 2'-O-methyladenosine-3'-phosphate
  modified_base 21: mod_base = OTHER; note = 2'-O-methylcytidine-3'-phosphorothioate
  modified_base 22: mod_base = OTHER; note = 2'-O-methylcytidine-3'-phosphorothioate
  modified_base 23: mod_base = OTHER; note = 2'-O-methyladenosine
tcacattgtaagcctaaggacca

SEQ ID NO: 455 - RNA, 23 nt, synthetic construct
  source 1..23: mol_type = other RNA
tggtccttaggcttacaatgtgc

SEQ ID NO: 456 - RNA, 21 nt, synthetic construct
  source 1..21: mol_type = other RNA
  modified_base 1: mod_base = OTHER; note = 2'-O-methyluridine-3'-phosphorothioate
  modified_base 2: mod_base = OTHER; note = 2'-O-methylcytidine-3'-phosphorothioate
  modified_base 3: mod_base = OTHER; note = 2'-O-methylcytidine-3'-phosphate
  modified_base 4: mod_base = OTHER; note = 2'-O-methyluridine-3'-phosphate
  modified_base 5: mod_base = OTHER; note = 2'-O-methyluridine-3'-phosphate
  modified_base 6: mod_base = OTHER; note = 2'-O-hexadecyl-uridine-3'-phosphate
  modified_base 7: mod_base = OTHER; note = 2'-deoxy-2'-fluorocytidine-3'-phosphate
  modified_base 8: mod_base = OTHER; note = 2'-O-methyluridine-3'-phosphate
  modified_base 9: mod_base = OTHER; note = 2'-deoxy-2'-fluorouridine-3'-phosphate
  modified_base 10: mod_base = OTHER; note = 2'-deoxy-2'-fluorouridine-3'-phosphate
  modified_base 11: mod_base = OTHER; note = 2'-deoxy-2'-fluoroadenosine-3'-phosphate
  modified_base 12: mod_base = OTHER; note = 2'-O-methyladenosine-3'-phosphate
  modified_base 13: mod_base = OTHER; note = 2'-O-methyladenosine-3'-phosphate
  modified_base 14: mod_base = OTHER; note = 2'-O-methylcytidine-3'-phosphate
  modified_base 15: mod_base = OTHER; note = 2'-O-methyluridine-3'-phosphate
  modified_base 16: mod_base = OTHER; note = 2'-O-methyladenosine-3'-phosphate
  modified_base 17: mod_base = OTHER; note = 2'-O-methyluridine-3'-phosphate
  modified_base 18: mod_base = OTHER; note = 2'-O-methyladenosine-3'-phosphate
  modified_base 19: mod_base = OTHER; note = 2'-O-methylguanosine-3'-phosphorothioate
  modified_base 20: mod_base = OTHER; note = 2'-O-methylguanosine-3'-phosphorothioate
  modified_base 21: mod_base = OTHER; note = 2'-O-methyladenosine
tcctttctttaaactatagga

SEQ ID NO: 457 - RNA, 23 nt, synthetic construct
  source 1..23: mol_type = other RNA
  modified_base 1: mod_base = OTHER; note = 2'-O-methyluridine-3'-phosphorothioate 5'-(E)-Vinylphosphonate
  modified_base 2: mod_base = OTHER; note = 2'-deoxy-2'-fluorocytidine-3'-phosphorothioate
  modified_base 3: mod_base = OTHER; note = 2'-O-methylcytidine-3'-phosphate
  modified_base 4: mod_base = OTHER; note = 2'-O-methyluridine-3'-phosphate
  modified_base 5: mod_base = OTHER; note = 2'-O-methyladenosine-3'-phosphate
  modified_base 6: mod_base = OTHER; note = 2'-deoxy-2'-fluorouridine-3'-phosphate
  modified_base 7: mod_base = OTHER; note = 2'-O-methyladenosine-3'-phosphate
  modified_base 8: mod_base = OTHER; note = 2'-deoxy-2'-fluoroguanosine-3'-phosphate
  modified_base 9: mod_base = OTHER; note = 2'-deoxy-2'-fluorouridine-3'-phosphate
  modified_base 10: mod_base = OTHER; note = 2'-O-methyluridine-3'-phosphate
  modified_base 11: mod_base = OTHER; note = 2'-O-methyluridine-3'-phosphate
  modified_base 12: mod_base = OTHER; note = 2'-O-methyladenosine-3'-phosphate
  modified_base 13: mod_base = OTHER; note = 2'-O-methyladenosine-3'-phosphate
  modified_base 14: mod_base = OTHER; note = 2'-deoxy-2'-fluoroadenosine-3'-phosphate
  modified_base 15: mod_base = OTHER; note = 2'-O-methylguanosine-3'-phosphate
  modified_base 16: mod_base = OTHER; note = 2'-deoxy-2'-fluoroadenosine-3'-phosphate
  modified_base 17: mod_base = OTHER; note = 2'-O-methyladenosine-3'-phosphate
  modified_base 18: mod_base = OTHER; note = 2'-O-methyladenosine-3'-phosphate
  modified_base 19: mod_base = OTHER; note = 2'-O-methylguanosine-3'-phosphate
  modified_base 20: mod_base = OTHER; note = 2'-O-methylguanosine-3'-phosphate
  modified_base 21: mod_base = OTHER; note = 2'-O-methyladenosine-3'-phosphorothioate
  modified_base 22: mod_base = OTHER; note = 2'-O-methyladenosine-3'-phosphorothioate
  modified_base 23: mod_base = OTHER; note = 2'-O-methyluridine
tcctatagtttaaagaaaggaat

SEQ ID NO: 458 - RNA, 23 nt, synthetic construct
  source 1..23: mol_type = other RNA
attcctttctttaaactataggt

SEQ ID NO: 459 - RNA, 21 nt, synthetic construct
  source 1..21: mol_type = other RNA
  modified_base 1: mod_base = OTHER; note = 2'-O-methyladenosine-3'-phosphorothioate
  modified_base 2: mod_base = OTHER; note = 2'-O-methyluridine-3'-phosphorothioate
  modified_base 3: mod_base = OTHER; note = 2'-O-methylcytidine-3'-phosphate
  modified_base 4: mod_base = OTHER; note = 2'-O-methylcytidine-3'-phosphate
  modified_base 5: mod_base = OTHER; note = 2'-O-methyluridine-3'-phosphate
  modified_base 6: mod_base = OTHER; note = 2'-O-hexadecyl-adenosine-3'-phosphate
  modified_base 7: mod_base = OTHER; note = 2'-deoxy-2'-fluoroguanosine-3'-phosphate
  modified_base 8: mod_base = OTHER; note = 2'-O-methyladenosine-3'-phosphate
  modified_base 9: mod_base = OTHER; note = 2'-deoxy-2'-fluoroguanosine-3'-phosphate
  modified_base 10: mod_base = OTHER; note = 2'-deoxy-2'-fluoroadenosine-3'-phosphate
  modified_base 11: mod_base = OTHER; note = 2'-deoxy-2'-fluorouridine-3'-phosphate
  modified_base 12: mod_base = OTHER; note = 2'-O-methyluridine-3'-phosphate
  modified_base 13: mod_base = OTHER; note = 2'-O-methylcytidine-3'-phosphate
  modified_base 14: mod_base = OTHER; note = 2'-O-methyluridine-3'-phosphate
  modified_base 15: mod_base = OTHER; note = 2'-O-methyluridine-3'-phosphate
  modified_base 16: mod_base = OTHER; note = 2'-O-methyladenosine-3'-phosphate
  modified_base 17: mod_base = OTHER; note = 2'-O-methylguanosine-3'-phosphate
  modified_base 18: mod_base = OTHER; note = 2'-O-methylcytidine-3'-phosphate
  modified_base 19: mod_base = OTHER; note = 2'-O-methyluridine-3'-phosphorothioate
  modified_base 20: mod_base = OTHER; note = 2'-O-methylcytidine-3'-phosphorothioate
  modified_base 21: mod_base = OTHER; note = 2'-O-methyladenosine
atcctagagattcttagctca

SEQ ID NO: 460 - RNA, 23 nt, synthetic construct
  source 1..23: mol_type = other RNA
  modified_base 1: mod_base = OTHER; note = 2'-O-methyluridine-3'-phosphorothioate 5'-(E)-Vinylphosphonate
  modified_base 2: mod_base = OTHER; note = 2'-deoxy-2'-fluoroguanosine-3'-phosphorothioate
  modified_base 3: mod_base = OTHER; note = 2'-O-methyladenosine-3'-phosphate
  modified_base 4: mod_base = OTHER; note = 2'-O-methylguanosine-3'-phosphate
  modified_base 5: mod_base = OTHER; note = 2'-O-methylcytidine-3'-phosphate
  modified_base 6: mod_base = OTHER; note = 2'-deoxy-2'-fluorouridine-3'-phosphate
  modified_base 7: mod_base = OTHER; note = 2'-O-methyladenosine-3'-phosphate
  modified_base 8: mod_base = OTHER; note = 2'-deoxy-2'-fluoroadenosine-3'-phosphate
  modified_base 9: mod_base = OTHER; note = 2'-deoxy-2'-fluoroguanosine-3'-phosphate
  modified_base 10: mod_base = OTHER; note = 2'-O-methyladenosine-3'-phosphate
  modified_base 11: mod_base = OTHER; note = 2'-O-methyladenosine-3'-phosphate
  modified_base 12: mod_base = OTHER; note = 2'-O-methyluridine-3'-phosphate
  modified_base 13: mod_base = OTHER; note = 2'-O-methylcytidine-3'-phosphate
  modified_base 14: mod_base = OTHER; note = 2'-deoxy-2'-fluorouridine-3'-phosphate
  modified_base 15: mod_base = OTHER; note = 2'-O-methylcytidine-3'-phosphate
  modified_base 16: mod_base = OTHER; note = 2'-deoxy-2'-fluorouridine-3'-phosphate
  modified_base 17: mod_base = OTHER; note = 2'-O-methyladenosine-3'-phosphate
  modified_base 18: mod_base = OTHER; note = 2'-O-methylguanosine-3'-phosphate
  modified_base 19: mod_base = OTHER; note = 2'-O-methylguanosine-3'-phosphate
  modified_base 20: mod_base = OTHER; note = 2'-O-methyladenosine-3'-phosphate
  modified_base 21: mod_base = OTHER; note = 2'-O-methyluridine-3'-phosphorothioate
  modified_base 22: mod_base = OTHER; note = 2'-O-methyluridine-3'-phosphorothioate
  modified_base 23: mod_base = OTHER; note = 2'-O-methyluridine
tgagctaagaatctctaggattt

SEQ ID NO: 461 - RNA, 23 nt, synthetic construct
  source 1..23: mol_type = other RNA
aaatcctagagattcttagctct

SEQ ID NO: 462 - RNA, 21 nt, synthetic construct
  source 1..21: mol_type = other RNA
  modified_base 1: mod_base = OTHER; note = 2'-O-methylguanosine-3'-phosphorothioate
  modified_base 2: mod_base = OTHER; note = 2'-O-methyluridine-3'-phosphorothioate
  modified_base 3: mod_base = OTHER; note = 2'-O-methylguanosine-3'-phosphate
  modified_base 4: mod_base = OTHER; note = 2'-O-methylguanosine-3'-phosphate
  modified_base 5: mod_base = OTHER; note = 2'-O-methyladenosine-3'-phosphate
  modified_base 6: mod_base = OTHER; note = 2'-O-hexadecyl-adenosine-3'-phosphate
  modified_base 7: mod_base = OTHER; note = 2'-deoxy-2'-fluorocytidine-3'-phosphate
  modified_base 8: mod_base = OTHER; note = 2'-O-methyladenosine-3'-phosphate
  modified_base 9: mod_base = OTHER; note = 2'-deoxy-2'-fluoroadenosine-3'-phosphate
  modified_base 10: mod_base = OTHER; note = 2'-deoxy-2'-fluoroguanosine-3'-phosphate
  modified_base 11: mod_base = OTHER; note = 2'-deoxy-2'-fluorocytidine-3'-phosphate
  modified_base 12: mod_base = OTHER; note = 2'-O-methylcytidine-3'-phosphate
  modified_base 13: mod_base = OTHER; note = 2'-O-methylguanosine-3'-phosphate
  modified_base 14: mod_base = OTHER; note = 2'-O-methyladenosine-3'-phosphate
  modified_base 15: mod_base = OTHER; note = 2'-O-methylguanosine-3'-phosphate
  modified_base 16: mod_base = OTHER; note = 2'-O-methyluridine-3'-phosphate
  modified_base 17: mod_base = OTHER; note = 2'-O-methyladenosine-3'-phosphate
  modified_base 18: mod_base = OTHER; note = 2'-O-methyladenosine-3'-phosphate
  modified_base 19: mod_base = OTHER; note = 2'-O-methylguanosine-3'-phosphorothioate
  modified_base 20: mod_base = OTHER; note = 2'-O-methylcytidine-3'-phosphorothioate
  modified_base 21: mod_base = OTHER; note = 2'-O-methyladenosine
gtggaacaagccgagtaagca

SEQ ID NO: 463 - RNA, 23 nt, synthetic construct
  source 1..23: mol_type = other RNA
  modified_base 1: mod_base = OTHER; note = 2'-O-methyluridine-3'-phosphorothioate 5'-(E)-Vinylphosphonate
  modified_base 2: mod_base = OTHER; note = 2'-deoxy-2'-fluoroguanosine-3'-phosphorothioate
  modified_base 3: mod_base = OTHER; note = 2'-O-methylcytidine-3'-phosphate
  modified_base 4: mod_base = OTHER; note = 2'-O-methyluridine-3'-phosphate
  modified_base 5: mod_base = OTHER; note = 2'-O-methyluridine-3'-phosphate
  modified_base 6: mod_base = OTHER; note = 2'-deoxy-2'-fluoroadenosine-3'-phosphate
  modified_base 7: mod_base = OTHER; note = 2'-O-methylcytidine-3'-phosphate
  modified_base 8: mod_base = OTHER; note = 2'-deoxy-2'-fluorouridine-3'-phosphate
  modified_base 9: mod_base = OTHER; note = 2'-deoxy-2'-fluorocytidine-3'-phosphate
  modified_base 10: mod_base = OTHER; note = 2'-O-methylguanosine-3'-phosphate
  modified_base 11: mod_base = OTHER; note = 2'-O-methylguanosine-3'-phosphate
  modified_base 12: mod_base = OTHER; note = 2'-O-methylcytidine-3'-phosphate
  modified_base 13: mod_base = OTHER; note = 2'-O-methyluridine-3'-phosphate
  modified_base 14: mod_base = OTHER; note = 2'-deoxy-2'-fluorouridine-3'-phosphate
  modified_base 15: mod_base = OTHER; note = 2'-O-methylguanosine-3'-phosphate
  modified_base 16: mod_base = OTHER; note = 2'-deoxy-2'-fluorouridine-3'-phosphate
  modified_base 17: mod_base = OTHER; note = 2'-O-methyluridine-3'-phosphate
  modified_base 18: mod_base = OTHER; note = 2'-O-methylcytidine-3'-phosphate
  modified_base 19: mod_base = OTHER; note = 2'-O-methylcytidine-3'-phosphate
  modified_base 20: mod_base = OTHER; note = 2'-O-methyladenosine-3'-phosphate
  modified_base 21: mod_base = OTHER; note = 2'-O-methylcytidine-3'-phosphorothioate
  modified_base 22: mod_base = OTHER; note = 2'-O-methyluridine-3'-phosphorothioate
  modified_base 23: mod_base = OTHER; note = 2'-O-methylguanosine
tgcttactcggcttgttccactg

SEQ ID NO: 464 - RNA, 23 nt, synthetic construct
  source 1..23: mol_type = other RNA
cagtggaacaagccgagtaagcc

SEQ ID NO: 465 - RNA, 21 nt, synthetic construct
  source 1..21: mol_type = other RNA
  modified_base 1: mod_base = OTHER; note = 2'-O-methylcytidine-3'-phosphorothioate
  modified_base 2: mod_base = OTHER; note = 2'-O-methyluridine-3'-phosphorothioate
  modified_base 3: mod_base = OTHER; note = 2'-O-methyluridine-3'-phosphate
  modified_base 4: mod_base = OTHER; note = 2'-O-methyladenosine-3'-phosphate
  modified_base 5: mod_base = OTHER; note = 2'-O-methyluridine-3'-phosphate
  modified_base 6: mod_base = OTHER; note = 2'-O-hexadecyl-uridine-3'-phosphate
  modified_base 7: mod_base = OTHER; note = 2'-deoxy-2'-fluorouridine-3'-phosphate
  modified_base 8: mod_base = OTHER; note = 2'-O-methyluridine-3'-phosphate
  modified_base 9: mod_base = OTHER; note = 2'-deoxy-2'-fluorouridine-3'-phosphate
  modified_base 10: mod_base = OTHER; note = 2'-deoxy-2'-fluoroguanosine-3'-phosphate
  modified_base 11: mod_base = OTHER; note = 2'-deoxy-2'-fluoroguanosine-3'-phosphate
  modified_base 12: mod_base = OTHER; note = 2'-O-methyladenosine-3'-phosphate
  modified_base 13: mod_base = OTHER; note = 2'-O-methylcytidine-3'-phosphate
  modified_base 14: mod_base = OTHER; note = 2'-O-methyluridine-3'-phosphate
  modified_base 15: mod_base = OTHER; note = 2'-O-methyluridine-3'-phosphate
  modified_base 16: mod_base = OTHER; note = 2'-O-methyladenosine-3'-phosphate
  modified_base 17: mod_base = OTHER; note = 2'-O-methylguanosine-3'-phosphate
  modified_base 18: mod_base = OTHER; note = 2'-O-methyluridine-3'-phosphate
  modified_base 19: mod_base = OTHER; note = 2'-O-methylguanosine-3'-phosphorothioate
  modified_base 20: mod_base = OTHER; note = 2'-O-methylcytidine-3'-phosphorothioate
  modified_base 21: mod_base = OTHER; note = 2'-O-methyladenosine
cttatttttggacttagtgca

SEQ ID NO: 466 - RNA, 23 nt, synthetic construct
  source 1..23: mol_type = other RNA
  modified_base 1: mod_base = OTHER; note = 2'-O-methyluridine-3'-phosphorothioate 5'-(E)-Vinylphosphonate
  modified_base 2: mod_base = OTHER; note = 2'-deoxy-2'-fluoroguanosine-3'-phosphorothioate
  modified_base 3: mod_base = OTHER; note = 2'-O-methylcytidine-3'-phosphate
  modified_base 4: mod_base = OTHER; note = 2'-O-methyladenosine-3'-phosphate
  modified_base 5: mod_base = OTHER; note = 2'-O-methylcytidine-3'-phosphate
  modified_base 6: mod_base = OTHER; note = 2'-deoxy-2'-fluorouridine-3'-phosphate
  modified_base 7: mod_base = OTHER; note = 2'-O-methyladenosine-3'-phosphate
  modified_base 8: mod_base = OTHER; note = 2'-deoxy-2'-fluoroadenosine-3'-phosphate
  modified_base 9: mod_base = OTHER; note = 2'-deoxy-2'-fluoroguanosine-3'-phosphate
  modified_base 10: mod_base = OTHER; note = 2'-O-methyluridine-3'-phosphate
  modified_base 11: mod_base = OTHER; note = 2'-O-methylcytidine-3'-phosphate
  modified_base 12: mod_base = OTHER; note = 2'-O-methylcytidine-3'-phosphate
  modified_base 13: mod_base = OTHER; note = 2'-O-methyladenosine-3'-phosphate
  modified_base 14: mod_base = OTHER; note = 2'-deoxy-2'-fluoroadenosine-3'-phosphate
  modified_base 15: mod_base = OTHER; note = 2'-O-methyladenosine-3'-phosphate
  modified_base 16: mod_base = OTHER; note = 2'-deoxy-2'-fluoroadenosine-3'-phosphate
  modified_base 17: mod_base = OTHER; note = 2'-O-methyladenosine-3'-phosphate
  modified_base 18: mod_base = OTHER; note = 2'-O-methyluridine-3'-phosphate
  modified_base 19: mod_base = OTHER; note = 2'-O-methyladenosine-3'-phosphate
  modified_base 20: mod_base = OTHER; note = 2'-O-methyladenosine-3'-phosphate
  modified_base 21: mod_base = OTHER; note = 2'-O-methylguanosine-3'-phosphorothioate
  modified_base 22: mod_base = OTHER; note = 2'-O-methyluridine-3'-phosphorothioate
  modified_base 23: mod_base = OTHER; note = 2'-O-methylcytidine
tgcactaagtccaaaaataagtc

SEQ ID NO: 467 - RNA, 23 nt, synthetic construct
  source 1..23: mol_type = other RNA
gacttatttttggacttagtgca

SEQ ID NO: 468 - RNA, 21 nt, synthetic construct
  source 1..21: mol_type = other RNA
  modified_base 1: mod_base = OTHER; note = 2'-O-methylguanosine-3'-phosphorothioate
  modified_base 2: mod_base = OTHER; note = 2'-O-methyladenosine-3'-phosphorothioate
  modified_base 3: mod_base = OTHER; note = 2'-O-methylcytidine-3'-phosphate
  modified_base 4: mod_base = OTHER; note = 2'-O-methyluridine-3'-phosphate
  modified_base 5: mod_base = OTHER; note = 2'-O-methyluridine-3'-phosphate
  modified_base 6: mod_base = OTHER; note = 2'-O-hexadecyl-adenosine-3'-phosphate
  modified_base 7: mod_base = OTHER; note = 2'-deoxy-2'-fluoroguanosine-3'-phosphate
  modified_base 8: mod_base = OTHER; note = 2'-O-methyluridine-3'-phosphate
  modified_base 9: mod_base = OTHER; note = 2'-deoxy-2'-fluoroguanosine-3'-phosphate
  modified_base 10: mod_base = OTHER; note = 2'-deoxy-2'-fluorocytidine-3'-phosphate
  modified_base 11: mod_base = OTHER; note = 2'-deoxy-2'-fluoroadenosine-3'-phosphate
  modified_base 12: mod_base = OTHER; note = 2'-O-methyladenosine-3'-phosphate
  modified_base 13: mod_base = OTHER; note = 2'-O-methylcytidine-3'-phosphate
  modified_base 14: mod_base = OTHER; note = 2'-O-methyladenosine-3'-phosphate
  modified_base 15: mod_base = OTHER; note = 2'-O-methylguanosine-3'-phosphate
  modified_base 16: mod_base = OTHER; note = 2'-O-methylguanosine-3'-phosphate
  modified_base 17: mod_base = OTHER; note = 2'-O-methyluridine-3'-phosphate
  modified_base 18: mod_base = OTHER; note = 2'-O-methyluridine-3'-phosphate
  modified_base 19: mod_base = OTHER; note = 2'-O-methylguanosine-3'-phosphorothioate
  modified_base 20: mod_base = OTHER; note = 2'-O-methyladenosine-3'-phosphorothioate
  modified_base 21: mod_base = OTHER; note = 2'-O-methyladenosine
gacttagtgcaacaggttgaa

SEQ ID NO: 469 - RNA, 23 nt, synthetic construct
  source 1..23: mol_type = other RNA
  modified_base 1: mod_base = OTHER; note = 2'-O-methyluridine-3'-phosphorothioate 5'-(E)-Vinylphosphonate
  modified_base 2: mod_base = OTHER; note = 2'-deoxy-2'-fluorouridine-3'-phosphorothioate
  modified_base 3: mod_base = OTHER; note = 2'-O-methylcytidine-3'-phosphate
  modified_base 4: mod_base = OTHER; note = 2'-O-methyladenosine-3'-phosphate
  modified_base 5: mod_base = OTHER; note = 2'-O-methyladenosine-3'-phosphate
  modified_base 6: mod_base = OTHER; note = 2'-deoxy-2'-fluorocytidine-3'-phosphate
  modified_base 7: mod_base = OTHER; note = 2'-O-methylcytidine-3'-phosphate
  modified_base 8: mod_base = OTHER; note = 2'-deoxy-2'-fluorouridine-3'-phosphate
  modified_base 9: mod_base = OTHER; note = 2'-deoxy-2'-fluoroguanosine-3'-phosphate
  modified_base 10: mod_base = OTHER; note = 2'-O-methyluridine-3'-phosphate
  modified_base 11: mod_base = OTHER; note = 2'-O-methyluridine-3'-phosphate
  modified_base 12: mod_base = OTHER; note = 2'-O-methylguanosine-3'-phosphate
  modified_base 13: mod_base = OTHER; note = 2'-O-methylcytidine-3'-phosphate
  modified_base 14: mod_base = OTHER; note = 2'-deoxy-2'-fluoroadenosine-3'-phosphate
  modified_base 15: mod_base = OTHER; note = 2'-O-methylcytidine-3'-phosphate
  modified_base 16: mod_base = OTHER; note = 2'-deoxy-2'-fluorouridine-3'-phosphate
  modified_base 17: mod_base = OTHER; note = 2'-O-methyladenosine-3'-phosphate
  modified_base 18: mod_base = OTHER; note = 2'-O-methyladenosine-3'-phosphate
  modified_base 19: mod_base = OTHER; note = 2'-O-methylguanosine-3'-phosphate
  modified_base 20: mod_base = OTHER; note = 2'-O-methyluridine-3'-phosphate
  modified_base 21: mod_base = OTHER; note = 2'-O-methylcytidine-3'-phosphorothioate
  modified_base 22: mod_base = OTHER; note = 2'-O-methylcytidine-3'-phosphorothioate
  modified_base 23: mod_base = OTHER; note = 2'-O-methyladenosine
ttcaacctgttgcactaagtcca

SEQ ID NO: 470 - RNA, 23 nt, synthetic construct
  source 1..23: mol_type = other RNA
tggacttagtgcaacaggttgag

SEQ ID NO: 471 - RNA, 21 nt, synthetic construct
  source 1..21: mol_type = other RNA
  modified_base 1: mod_base = OTHER; note = 2'-O-methyladenosine-3'-phosphorothioate
  modified_base 2: mod_base = OTHER; note = 2'-O-methyladenosine-3'-phosphorothioate
  modified_base 3: mod_base = OTHER; note = 2'-O-methylcytidine-3'-phosphate
  modified_base 4: mod_base = OTHER; note = 2'-O-methyladenosine-3'-phosphate
  modified_base 5: mod_base = OTHER; note = 2'-O-methylguanosine-3'-phosphate
  modified_base 6: mod_base = OTHER; note = 2'-O-hexadecyl-cytidine-3'-phosphate
  modified_base 7: mod_base = OTHER; note = 2'-deoxy-2'-fluoroadenosine-3'-phosphate
  modified_base 8: mod_base = OTHER; note = 2'-O-methyladenosine-3'-phosphate
  modified_base 9: mod_base = OTHER; note = 2'-deoxy-2'-fluoroadenosine-3'-phosphate
  modified_base 10: mod_base = OTHER; note = 2'-deoxy-2'-fluorouridine-3'-phosphate
  modified_base 11: mod_base = OTHER; note = 2'-deoxy-2'-fluoroadenosine-3'-phosphate
  modified_base 12: mod_base = OTHER; note = 2'-O-methyladenosine-3'-phosphate
  modified_base 13: mod_base = OTHER; note = 2'-O-methylcytidine-3'-phosphate
  modified_base 14: mod_base = OTHER; note = 2'-O-methylcytidine-3'-phosphate
  modified_base 15: mod_base = OTHER; note = 2'-O-methyladenosine-3'-phosphate
  modified_base 16: mod_base = OTHER; note = 2'-O-methyluridine-3'-phosphate
  modified_base 17: mod_base = OTHER; note = 2'-O-methyluridine-3'-phosphate
  modified_base 18: mod_base = OTHER; note = 2'-O-methylguanosine-3'-phosphate
  modified_base 19: mod_base = OTHER; note = 2'-O-methylguanosine-3'-phosphorothioate
  modified_base 20: mod_base = OTHER; note = 2'-O-methyluridine-3'-phosphorothioate
  modified_base 21: mod_base = OTHER; note = 2'-O-methyladenosine
aacagcaaataaccattggta

SEQ ID NO: 472 - RNA, 23 nt, synthetic construct
  source 1..23: mol_type = other RNA
  modified_base 1: mod_base = OTHER; note = 2'-O-methyluridine-3'-phosphorothioate 5'-(E)-Vinylphosphonate
  modified_base 2: mod_base = OTHER; note = 2'-deoxy-2'-fluoroadenosine-3'-phosphorothioate
  modified_base 3: mod_base = OTHER; note = 2'-O-methylcytidine-3'-phosphate
  modified_base 4: mod_base = OTHER; note = 2'-O-methylcytidine-3'-phosphate
  modified_base 5: mod_base = OTHER; note = 2'-O-methyladenosine-3'-phosphate
  modified_base 6: mod_base = OTHER; note = 2'-deoxy-2'-fluoroadenosine-3'-phosphate
  modified_base 7: mod_base = OTHER; note = 2'-O-methyluridine-3'-phosphate
  modified_base 8: mod_base = OTHER; note = 2'-deoxy-2'-fluoroguanosine-3'-phosphate
  modified_base 9: mod_base = OTHER; note = 2'-deoxy-2'-fluoroguanosine-3'-phosphate
  modified_base 10: mod_base = OTHER; note = 2'-O-methyluridine-3'-phosphate
  modified_base 11: mod_base = OTHER; note = 2'-O-methyluridine-3'-phosphate
  modified_base 12: mod_base = OTHER; note = 2'-O-methyladenosine-3'-phosphate
  modified_base 13: mod_base = OTHER; note = 2'-O-methyluridine-3'-phosphate
  modified_base 14: mod_base = OTHER; note = 2'-deoxy-2'-fluorouridine-3'-phosphate
  modified_base 15: mod_base = OTHER; note = 2'-O-methyluridine-3'-phosphate
  modified_base 16: mod_base = OTHER; note = 2'-deoxy-2'-fluoroguanosine-3'-phosphate
  modified_base 17: mod_base = OTHER; note = 2'-O-methylcytidine-3'-phosphate
  modified_base 18: mod_base = OTHER; note = 2'-O-methyluridine-3'-phosphate
  modified_base 19: mod_base = OTHER; note = 2'-O-methylguanosine-3'-phosphate
  modified_base 20: mod_base = OTHER; note = 2'-O-methyluridine-3'-phosphate
  modified_base 21: mod_base = OTHER; note = 2'-O-methyluridine-3'-phosphorothioate
  modified_base 22: mod_base = OTHER; note = 2'-O-methyladenosine-3'-phosphorothioate
  modified_base 23: mod_base = OTHER; note = 2'-O-methyluridine
taccaatggttatttgctgttat

SEQ ID NO: 473 - RNA, 23 nt, synthetic construct
  source 1..23: mol_type = other RNA
ataacagcaaataaccattggtt

SEQ ID NO: 474 - RNA, 21 nt, synthetic construct
  source 1..21: mol_type = other RNA
  modified_base 1: mod_base = OTHER; note = 2'-O-methylguanosine-3'-phosphorothioate
  modified_base 2: mod_base = OTHER; note = 2'-O-methyluridine-3'-phosphorothioate
  modified_base 3: mod_base = OTHER; note = 2'-O-methylcytidine-3'-phosphate
  modified_base 4: mod_base = OTHER; note = 2'-O-methyluridine-3'-phosphate
  modified_base 5: mod_base = OTHER; note = 2'-O-methylguanosine-3'-phosphate
  modified_base 6: mod_base = OTHER; note = 2'-O-hexadecyl-adenosine-3'-phosphate
  modified_base 7: mod_base = OTHER; note = 2'-deoxy-2'-fluoroadenosine-3'-phosphate
  modified_base 8: mod_base = OTHER; note = 2'-O-methyladenosine-3'-phosphate
  modified_base 9: mod_base = OTHER; note = 2'-deoxy-2'-fluorouridine-3'-phosphate
  modified_base 10: mod_base = OTHER; note = 2'-deoxy-2'-fluoroadenosine-3'-phosphate
  modified_base 11: mod_base = OTHER; note = 2'-deoxy-2'-fluorocytidine-3'-phosphate
  modified_base 12: mod_base = OTHER; note = 2'-O-methylcytidine-3'-phosphate
  modified_base 13: mod_base = OTHER; note = 2'-O-methyluridine-3'-phosphate
  modified_base 14: mod_base = OTHER; note = 2'-O-methyluridine-3'-phosphate
  modified_base 15: mod_base = OTHER; note = 2'-O-methyluridine-3'-phosphate
  modified_base 16: mod_base = OTHER; note = 2'-O-methylguanosine-3'-phosphate
  modified_base 17: mod_base = OTHER; note = 2'-O-methylcytidine-3'-phosphate
  modified_base 18: mod_base = OTHER; note = 2'-O-methylcytidine-3'-phosphate
  modified_base 19: mod_base = OTHER; note = 2'-O-methyluridine-3'-phosphorothioate
  modified_base 20: mod_base = OTHER; note = 2'-O-methylguanosine-3'-phosphorothioate
  modified_base 21: mod_base = OTHER; note = 2'-O-methyladenosine
gtctgaaatacctttgcctga

SEQ ID NO: 475 - RNA, 23 nt, synthetic construct
  source 1..23: mol_type = other RNA
  modified_base 1: mod_base = OTHER; note = 2'-O-methyluridine-3'-phosphorothioate 5'-(E)-Vinylphosphonate
  modified_base 2: mod_base = OTHER; note = 2'-deoxy-2'-fluorocytidine-3'-phosphorothioate
  modified_base 3: mod_base = OTHER; note = 2'-O-methyladenosine-3'-phosphate
  modified_base 4: mod_base = OTHER; note = 2'-O-methylguanosine-3'-phosphate
  modified_base 5: mod_base = OTHER; note = 2'-O-methylguanosine-3'-phosphate
  modified_base 6: mod_base = OTHER; note = 2'-deoxy-2'-fluorocytidine-3'-phosphate
  modified_base 7: mod_base = OTHER; note = 2'-O-methyladenosine-3'-phosphate
  modified_base 8: mod_base = OTHER; note = 2'-deoxy-2'-fluoroadenosine-3'-phosphate
  modified_base 9: mod_base = OTHER; note = 2'-deoxy-2'-fluoroadenosine-3'-phosphate
  modified_base 10: mod_base = OTHER; note = 2'-O-methylguanosine-3'-phosphate
  modified_base 11: mod_base = OTHER; note = 2'-O-methylguanosine-3'-phosphate
  modified_base 12: mod_base = OTHER; note = 2'-O-methyluridine-3'-phosphate
  modified_base 13: mod_base = OTHER; note = 2'-O-methyladenosine-3'-phosphate
  modified_base 14: mod_base = OTHER; note = 2'-deoxy-2'-fluorouridine-3'-phosphate
  modified_base 15: mod_base = OTHER; note = 2'-O-methyluridine-3'-phosphate
  modified_base 16: mod_base = OTHER; note = 2'-deoxy-2'-fluorouridine-3'-phosphate
  modified_base 17: mod_base = OTHER; note = 2'-O-methylcytidine-3'-phosphate
  modified_base 18: mod_base = OTHER; note = 2'-O-methyladenosine-3'-phosphate
  modified_base 19: mod_base = OTHER; note = 2'-O-methylguanosine-3'-phosphate
  modified_base 20: mod_base = OTHER; note = 2'-O-methyladenosine-3'-phosphate
  modified_base 21: mod_base = OTHER; note = 2'-O-methylcytidine-3'-phosphorothioate
  modified_base 22: mod_base = OTHER; note = 2'-O-methyluridine-3'-phosphorothioate
  modified_base 23: mod_base = OTHER; note = 2'-O-methylguanosine
tcaggcaaaggtatttcagactg

SEQ ID NO: 476 - RNA, 23 nt, synthetic construct
  source 1..23: mol_type = other RNA
cagtctgaaatacctttgcctgg

SEQ ID NO: 477 - RNA, 21 nt, synthetic construct
  source 1..21: mol_type = other RNA
  modified_base 1: mod_base = OTHER; note = 2'-O-methylguanosine-3'-phosphorothioate
  modified_base 2: mod_base = OTHER; note = 2'-O-methylcytidine-3'-phosphorothioate
  modified_base 3: mod_base = OTHER; note = 2'-O-methylcytidine-3'-phosphate
  modified_base 4: mod_base = OTHER; note = 2'-O-methyladenosine-3'-phosphate
  modified_base 5: mod_base = OTHER; note = 2'-O-methylcytidine-3'-phosphate
  modified_base 6: mod_base = OTHER; note = 2'-O-hexadecyl-adenosine-3'-phosphate
  modified_base 7: mod_base = OTHER; note = 2'-deoxy-2'-fluorouridine-3'-phosphate
  modified_base 8: mod_base = OTHER; note = 2'-O-methylguanosine-3'-phosphate
  modified_base 9: mod_base = OTHER; note = 2'-deoxy-2'-fluoroadenosine-3'-phosphate
  modified_base 10: mod_base = OTHER; note = 2'-deoxy-2'-fluorouridine-3'-phosphate
  modified_base 11: mod_base = OTHER; note = 2'-deoxy-2'-fluoroadenosine-3'-phosphate
  modified_base 12: mod_base = OTHER; note = 2'-O-methylcytidine-3'-phosphate
  modified_base 13: mod_base = OTHER; note = 2'-O-methyluridine-3'-phosphate
  modified_base 14: mod_base = OTHER; note = 2'-O-methyluridine-3'-phosphate
  modified_base 15: mod_base = OTHER; note = 2'-O-methyladenosine-3'-phosphate
  modified_base 16: mod_base = OTHER; note = 2'-O-methyluridine-3'-phosphate
  modified_base 17: mod_base = OTHER; note = 2'-O-methyluridine-3'-phosphate
  modified_base 18: mod_base = OTHER; note = 2'-O-methylcytidine-3'-phosphate
  modified_base 19: mod_base = OTHER; note = 2'-O-methyladenosine-3'-phosphorothioate
  modified_base 20: mod_base = OTHER; note = 2'-O-methyladenosine-3'-phosphorothioate
  modified_base 21: mod_base = OTHER; note = 2'-O-methyladenosine
gccacatgatacttattcaaa

SEQ ID NO: 478 - RNA, 23 nt, synthetic construct
  source 1..23: mol_type = other RNA
  modified_base 1: mod_base = OTHER; note = 2'-O-methyluridine-3'-phosphorothioate 5'-(E)-Vinylphosphonate
  modified_base 2: mod_base = OTHER; note = 2'-deoxy-2'-fluorouridine-3'-phosphorothioate
  modified_base 3: mod_base = OTHER; note = 2'-O-methyluridine-3'-phosphate
  modified_base 4: mod_base = OTHER; note = 2'-O-methylguanosine-3'-phosphate
  modified_base 5: mod_base = OTHER; note = 2'-O-methyladenosine-3'-phosphate
  modified_base 6: mod_base = OTHER; note = 2'-deoxy-2'-fluoroadenosine-3'-phosphate
  modified_base 7: mod_base = OTHER; note = 2'-O-methyluridine-3'-phosphate
  modified_base 8: mod_base = OTHER; note = 2'-deoxy-2'-fluoroadenosine-3'-phosphate
  modified_base 9: mod_base = OTHER; note = 2'-deoxy-2'-fluoroadenosine-3'-phosphate
  modified_base 10: mod_base = OTHER; note = 2'-O-methylguanosine-3'-phosphate
  modified_base 11: mod_base = OTHER; note = 2'-O-methyluridine-3'-phosphate
  modified_base 12: mod_base = OTHER; note = 2'-O-methyladenosine-3'-phosphate
  modified_base 13: mod_base = OTHER; note = 2'-O-methyluridine-3'-phosphate
  modified_base 14: mod_base = OTHER; note = 2'-deoxy-2'-fluorocytidine-3'-phosphate
  modified_base 15: mod_base = OTHER; note = 2'-O-methyladenosine-3'-phosphate
  modified_base 16: mod_base = OTHER; note = 2'-deoxy-2'-fluorouridine-3'-phosphate
  modified_base 17: mod_base = OTHER; note = 2'-O-methylguanosine-3'-phosphate
  modified_base 18: mod_base = OTHER; note = 2'-O-methyluridine-3'-phosphate
  modified_base 19: mod_base = OTHER; note = 2'-O-methylguanosine-3'-phosphate
  modified_base 20: mod_base = OTHER; note = 2'-O-methylguanosine-3'-phosphate
  modified_base 21: mod_base = OTHER; note = 2'-O-methylcytidine-3'-phosphorothioate
  modified_base 22: mod_base = OTHER; note = 2'-O-methylcytidine-3'-phosphorothioate
  modified_base 23: mod_base = OTHER; note = 2'-O-methyluridine
tttgaataagtatcatgtggcct

SEQ ID NO: 479 - RNA, 23 nt, synthetic construct
  source 1..23: mol_type = other RNA
aggccacatgatacttattcaaa

SEQ ID NO: 480 - RNA, 21 nt, synthetic construct
  source 1..21: mol_type = other RNA
  modified_base 1: mod_base = OTHER; note = 2'-O-methyladenosine-3'-phosphorothioate
  modified_base 2: mod_base = OTHER; note = 2'-O-methylguanosine-3'-phosphorothioate
  modified_base 3: mod_base = OTHER; note = 2'-O-methylguanosine-3'-phosphate
  modified_base 4: mod_base = OTHER; note = 2'-O-methylcytidine-3'-phosphate
  modified_base 5: mod_base = OTHER; note = 2'-O-methyladenosine-3'-phosphate
  modified_base 6: mod_base = OTHER; note = 2'-O-hexadecyl-adenosine-3'-phosphate
  modified_base 7: mod_base = OTHER; note = 2'-deoxy-2'-fluoroadenosine-3'-phosphate
  modified_base 8: mod_base = OTHER; note = 2'-O-methyluridine-3'-phosphate
  modified_base 9: mod_base = OTHER; note = 2'-deoxy-2'-fluorocytidine-3'-phosphate
  modified_base 10: mod_base = OTHER; note = 2'-deoxy-2'-fluorouridine-3'-phosphate
  modified_base 11: mod_base = OTHER; note = 2'-deoxy-2'-fluorocytidine-3'-phosphate
  modified_base 12: mod_base = OTHER; note = 2'-O-methylcytidine-3'-phosphate
  modified_base 13: mod_base = OTHER; note = 2'-O-methyluridine-3'-phosphate
  modified_base 14: mod_base = OTHER; note = 2'-O-methyluridine-3'-phosphate
  modified_base 15: mod_base = OTHER; note = 2'-O-methyluridine-3'-phosphate
  modified_base 16: mod_base = OTHER; note = 2'-O-methylguanosine-3'-phosphate
  modified_base 17: mod_base = OTHER; note = 2'-O-methyluridine-3'-phosphate
  modified_base 18: mod_base = OTHER; note = 2'-O-methylcytidine-3'-phosphate
  modified_base 19: mod_base = OTHER; note = 2'-O-methylcytidine-3'-phosphorothioate
  modified_base 20: mod_base = OTHER; note = 2'-O-methyladenosine-3'-phosphorothioate
  modified_base 21: mod_base = OTHER; note = 2'-O-methyladenosine
aggcaaatctcctttgtccaa

SEQ ID NO: 481 - RNA, 23 nt, synthetic construct
  source 1..23: mol_type = other RNA
  modified_base 1: mod_base = OTHER; note = 2'-O-methyluridine-3'-phosphorothioate 5'-(E)-Vinylphosphonate
  modified_base 2: mod_base = OTHER; note = 2'-deoxy-2'-fluorouridine-3'-phosphorothioate
  modified_base 3: mod_base = OTHER; note = 2'-O-methylguanosine-3'-phosphate
  modified_base 4: mod_base = OTHER; note = 2'-O-methylguanosine-3'-phosphate
  modified_base 5: mod_base = OTHER; note = 2'-O-methyladenosine-3'-phosphate
  modified_base 6: mod_base = OTHER; note = 2'-deoxy-2'-fluorocytidine-3'-phosphate
  modified_base 7: mod_base = OTHER; note = 2'-O-methyladenosine-3'-phosphate
  modified_base 8: mod_base = OTHER; note = 2'-deoxy-2'-fluoroadenosine-3'-phosphate
  modified_base 9: mod_base = OTHER; note = 2'-deoxy-2'-fluoroadenosine-3'-phosphate
  modified_base 10: mod_base = OTHER; note = 2'-O-methylguanosine-3'-phosphate
  modified_base 11: mod_base = OTHER; note = 2'-O-methylguanosine-3'-phosphate
  modified_base 12: mod_base = OTHER; note = 2'-O-methyladenosine-3'-phosphate
  modified_base 13: mod_base = OTHER; note = 2'-O-methylguanosine-3'-phosphate
  modified_base 14: mod_base = OTHER; note = 2'-deoxy-2'-fluoroadenosine-3'-phosphate
  modified_base 15: mod_base = OTHER; note = 2'-O-methyluridine-3'-phosphate
  modified_base 16: mod_base = OTHER; note = 2'-deoxy-2'-fluorouridine-3'-phosphate
  modified_base 17: mod_base = OTHER; note = 2'-O-methyluridine-3'-phosphate
  modified_base 18: mod_base = OTHER; note = 2'-O-methylguanosine-3'-phosphate
  modified_base 19: mod_base = OTHER; note = 2'-O-methylcytidine-3'-phosphate
  modified_base 20: mod_base = OTHER; note = 2'-O-methylcytidine-3'-phosphate
  modified_base 21: mod_base = OTHER; note = 2'-O-methyluridine-3'-phosphorothioate
  modified_base 22: mod_base = OTHER; note = 2'-O-methyluridine-3'-phosphorothioate
  modified_base 23: mod_base = OTHER; note = 2'-O-methylcytidine
ttggacaaaggagatttgccttc

SEQ ID NO: 482 - RNA, 23 nt, synthetic construct
  source 1..23: mol_type = other RNA
gaaggcaaatctcctttgtccat

SEQ ID NO: 483 - RNA, 21 nt, synthetic construct
  source 1..21: mol_type = other RNA
  modified_base 1: mod_base = OTHER; note = 2'-O-methyluridine-3'-phosphorothioate
  modified_base 2: mod_base = OTHER; note = 2'-O-methylcytidine-3'-phosphorothioate
  modified_base 3: mod_base = OTHER; note = 2'-O-methyladenosine-3'-phosphate
  modified_base 4: mod_base = OTHER; note = 2'-O-methyladenosine-3'-phosphate
  modified_base 5: mod_base = OTHER; note = 2'-O-methylguanosine-3'-phosphate
  modified_base 6: mod_base = OTHER; note = 2'-O-hexadecyl-uridine-3'-phosphate
  modified_base 7: mod_base = OTHER; note = 2'-deoxy-2'-fluorouridine-3'-phosphate
  modified_base 8: mod_base = OTHER; note = 2'-O-methylcytidine-3'-phosphate
  modified_base 9: mod_base = OTHER; note = 2'-deoxy-2'-fluoroadenosine-3'-phosphate
  modified_base 10: mod_base = OTHER; note = 2'-deoxy-2'-fluorouridine-3'-phosphate
  modified_base 11: mod_base = OTHER; note = 2'-deoxy-2'-fluoroadenosine-3'-phosphate
  modified_base 12: mod_base = OTHER; note = 2'-O-methylguanosine-3'-phosphate
  modified_base 13: mod_base = OTHER; note = 2'-O-methyluridine-3'-phosphate
  modified_base 14: mod_base = OTHER; note = 2'-O-methyluridine-3'-phosphate
  modified_base 15: mod_base = OTHER; note = 2'-O-methyluridine-3'-phosphate
  modified_base 16: mod_base = OTHER; note = 2'-O-methylcytidine-3'-phosphate
  modified_base 17: mod_base = OTHER; note = 2'-O-methyluridine-3'-phosphate
  modified_base 18: mod_base = OTHER; note = 2'-O-methylguanosine-3'-phosphate
  modified_base 19: mod_base = OTHER; note = 2'-O-methyluridine-3'-phosphorothioate
  modified_base 20: mod_base = OTHER; note = 2'-O-methyladenosine-3'-phosphorothioate
  modified_base 21: mod_base = OTHER; note = 2'-O-methyladenosine
tcaagttcatagtttctgtaa

SEQ ID NO: 484 - RNA, 23 nt, synthetic construct
  source 1..23: mol_type = other RNA
  modified_base 1: mod_base = OTHER; note = 2'-O-methyluridine-3'-phosphorothioate 5'-(E)-Vinylphosphonate
  modified_base 2: mod_base = OTHER; note = 2'-deoxy-2'-fluorouridine-3'-phosphorothioate
  modified_base 3: mod_base = OTHER; note = 2'-O-methyladenosine-3'-phosphate
  modified_base 4: mod_base = OTHER; note = 2'-O-methylcytidine-3'-phosphate
  modified_base 5: mod_base = OTHER; note = 2'-O-methyladenosine-3'-phosphate
  modified_base 6: mod_base = OTHER; note = 2'-deoxy-2'-fluoroguanosine-3'-phosphate
  modified_base 7: mod_base = OTHER; note = 2'-O-methyladenosine-3'-phosphate
  modified_base 8: mod_base = OTHER; note = 2'-deoxy-2'-fluoroadenosine-3'-phosphate
  modified_base 9: mod_base = OTHER; note = 2'-deoxy-2'-fluoroadenosine-3'-phosphate
  modified_base 10: mod_base = OTHER; note = 2'-O-methylcytidine-3'-phosphate
  modified_base 11: mod_base = OTHER; note = 2'-O-methyluridine-3'-phosphate
  modified_base 12: mod_base = OTHER; note = 2'-O-methyladenosine-3'-phosphate
  modified_base 13: mod_base = OTHER; note = 2'-O-methyluridine-3'-phosphate
  modified_base 14: mod_base = OTHER; note = 2'-deoxy-2'-fluoroguanosine-3'-phosphate
  modified_base 15: mod_base = OTHER; note = 2'-O-methyladenosine-3'-phosphate
  modified_base 16: mod_base = OTHER; note = 2'-deoxy-2'-fluoroadenosine-3'-phosphate
  modified_base 17: mod_base = OTHER; note = 2'-O-methylcytidine-3'-phosphate
  modified_base 18: mod_base = OTHER; note = 2'-O-methyluridine-3'-phosphate
  modified_base 19: mod_base = OTHER; note = 2'-O-methyluridine-3'-phosphate
  modified_base 20: mod_base = OTHER; note = 2'-O-methylguanosine-3'-phosphate
  modified_base 21: mod_base = OTHER; note = 2'-O-methyladenosine-3'-phosphorothioate
  modified_base 22: mod_base = OTHER; note = 2'-O-methylcytidine-3'-phosphorothioate
  modified_base 23: mod_base = OTHER; note = 2'-O-methylcytidine
ttacagaaactatgaacttgacc

SEQ ID NO: 485 - RNA, 23 nt, synthetic construct
  source 1..23: mol_type = other RNA
ggtcaagttcatagtttctgtaa

SEQ ID NO: 486 - RNA, 21 nt, synthetic construct
  source 1..21: mol_type = other RNA
  modified_base 1: mod_base = OTHER; note = 2'-O-methyladenosine-3'-phosphorothioate
  modified_base 2: mod_base = OTHER; note = 2'-O-methyluridine-3'-phosphorothioate
  modified_base 3: mod_base = OTHER; note = 2'-O-methylguanosine-3'-phosphate
  modified_base 4: mod_base = OTHER; note = 2'-O-methyluridine-3'-phosphate
  modified_base 5: mod_base = OTHER; note = 2'-O-methylguanosine-3'-phosphate
  modified_base 6: mod_base = OTHER; note = 2'-O-hexadecyl-cytidine-3'-phosphate
  modified_base 7: mod_base = OTHER; note = 2'-deoxy-2'-fluoroadenosine-3'-phosphate
  modified_base 8: mod_base = OTHER; note = 2'-O-methylcytidine-3'-phosphate
  modified_base 9: mod_base = OTHER; note = 2'-deoxy-2'-fluorouridine-3'-phosphate
  modified_base 10: mod_base = OTHER; note = 2'-deoxy-2'-fluoroguanosine-3'-phosphate
  modified_base 11: mod_base = OTHER; note = 2'-deoxy-2'-fluoroadenosine-3'-phosphate
  modified_base 12: mod_base = OTHER; note = 2'-O-methyladenosine-3'-phosphate
  modified_base 13: mod_base = OTHER; note = 2'-O-methyluridine-3'-phosphate
  modified_base 14: mod_base = OTHER; note = 2'-O-methylcytidine-3'-phosphate
  modified_base 15: mod_base = OTHER; note = 2'-O-methylguanosine-3'-phosphate
  modified_base 16: mod_base = OTHER; note = 2'-O-methyluridine-3'-phosphate
  modified_base 17: mod_base = OTHER; note = 2'-O-methyluridine-3'-phosphate
  modified_base 18: mod_base = OTHER; note = 2'-O-methyluridine-3'-phosphate
  modified_base 19: mod_base = OTHER; note = 2'-O-methylcytidine-3'-phosphorothioate
  modified_base 20: mod_base = OTHER; note = 2'-O-methyladenosine-3'-phosphorothioate
  modified_base 21: mod_base = OTHER; note = 2'-O-methyladenosine
atgtgcactgaatcgtttcaa

SEQ ID NO: 487 - RNA, 23 nt, synthetic construct
  source 1..23: mol_type = other RNA
  modified_base 1: mod_base = OTHER; note = 2'-O-methyluridine-3'-phosphorothioate 5'-(E)-Vinylphosphonate
  modified_base 2: mod_base = OTHER; note = 2'-deoxy-2'-fluorouridine-3'-phosphorothioate
  modified_base 3: mod_base = OTHER; note = 2'-O-methylguanosine-3'-phosphate
  modified_base 4: mod_base = OTHER; note = 2'-O-methyladenosine-3'-phosphate
  modified_base 5: mod_base = OTHER; note = 2'-O-methyladenosine-3'-phosphate
  modified_base 6: mod_base = OTHER; note = 2'-deoxy-2'-fluoroadenosine-3'-phosphate
  modified_base 7: mod_base = OTHER; note = 2'-O-methylcytidine-3'-phosphate
  modified_base 8: mod_base = OTHER; note = 2'-deoxy-2'-fluoroguanosine-3'-phosphate
  modified_base 9: mod_base = OTHER; note = 2'-deoxy-2'-fluoroadenosine-3'-phosphate
  modified_base 10: mod_base = OTHER; note = 2'-O-methyluridine-3'-phosphate
  modified_base 11: mod_base = OTHER; note = 2'-O-methyluridine-3'-phosphate
  modified_base 12: mod_base = OTHER; note = 2'-O-methylcytidine-3'-phosphate
  modified_base 13: mod_base = OTHER; note = 2'-O-methyladenosine-3'-phosphate
  modified_base 14: mod_base = OTHER; note = 2'-deoxy-2'-fluoroguanosine-3'-phosphate
  modified_base 15: mod_base = OTHER; note = 2'-O-methyluridine-3'-phosphate
  modified_base 16: mod_base = OTHER; note = 2'-deoxy-2'-fluoroguanosine-3'-phosphate
  modified_base 17: mod_base = OTHER; note = 2'-O-methylcytidine-3'-phosphate
  modified_base 18: mod_base = OTHER; note = 2'-O-methyladenosine-3'-phosphate
  modified_base 19: mod_base = OTHER; note = 2'-O-methylcytidine-3'-phosphate
  modified_base 20: mod_base = OTHER; note = 2'-O-methyladenosine-3'-phosphate
  modified_base 21: mod_base = OTHER; note = 2'-O-methyluridine-3'-phosphorothioate
  modified_base 22: mod_base = OTHER; note = 2'-O-methyluridine-3'-phosphorothioate
  modified_base 23: mod_base = OTHER; note = 2'-O-methylguanosine
ttgaaacgattcagtgcacattg

SEQ ID NO: 488 - RNA, 23 nt, synthetic construct
  source 1..23: mol_type = other RNA
caatgtgcactgaatcgtttcat

SEQ ID NO: 489 - RNA, 21 nt, synthetic construct
  source 1..21: mol_type = other RNA
  modified_base 1: mod_base = OTHER; note = 2'-O-methyladenosine-3'-phosphorothioate
  modified_base 2: mod_base = OTHER; note = 2'-O-methyluridine-3'-phosphorothioate
  modified_base 3: mod_base = OTHER; note = 2'-O-methylcytidine-3'-phosphate
  modified_base 4: mod_base = OTHER; note = 2'-O-methyluridine-3'-phosphate
  modified_base 5: mod_base = OTHER; note = 2'-O-methylguanosine-3'-phosphate
  modified_base 6: mod_base = OTHER; note = 2'-O-hexadecyl-adenosine-3'-phosphate
  modified_base 7: mod_base = OTHER; note = 2'-deoxy-2'-fluorocytidine-3'-phosphate
  modified_base 8: mod_base = OTHER; note = 2'-O-methyluridine-3'-phosphate
  modified_base 9: mod_base = OTHER; note = 2'-deoxy-2'-fluoroguanosine-3'-phosphate
  modified_base 10: mod_base = OTHER; note = 2'-deoxy-2'-fluoroadenosine-3'-phosphate
  modified_base 11: mod_base = OTHER; note = 2'-deoxy-2'-fluoroadenosine-3'-phosphate
  modified_base 12: mod_base = OTHER; note = 2'-O-methyladenosine-3'-phosphate
  modified_base 13: mod_base = OTHER; note = 2'-O-methyluridine-3'-phosphate
  modified_base 14: mod_base = OTHER; note = 2'-O-methyluridine-3'-phosphate
  modified_base 15: mod_base = OTHER; note = 2'-O-methyladenosine-3'-phosphate
  modified_base 16: mod_base = OTHER; note = 2'-O-methyladenosine-3'-phosphate
  modified_base 17: mod_base = OTHER; note = 2'-O-methyladenosine-3'-phosphate
  modified_base 18: mod_base = OTHER; note = 2'-O-methylcytidine-3'-phosphate
  modified_base 19: mod_base = OTHER; note = 2'-O-methylguanosine-3'-phosphorothioate
  modified_base 20: mod_base = OTHER; note = 2'-O-methyladenosine-3'-phosphorothioate
  modified_base 21: mod_base = OTHER; note = 2'-O-methyladenosine
atctgactgaaattaaacgaa

SEQ ID NO: 490 - RNA, 23 nt, synthetic construct
  source 1..23: mol_type = other RNA
  modified_base 1: mod_base = OTHER; note = 2'-O-methyluridine-3'-phosphorothioate 5'-(E)-Vinylphosphonate
  modified_base 2: mod_base = OTHER; note = 2'-deoxy-2'-fluorouridine-3'-phosphorothioate
  modified_base 3: mod_base = OTHER; note = 2'-O-methylcytidine-3'-phosphate
  modified_base 4: mod_base = OTHER; note = 2'-O-methylguanosine-3'-phosphate
  modified_base 5: mod_base = OTHER; note = 2'-O-methyluridine-3'-phosphate
  modified_base 6: mod_base = OTHER; note = 2'-deoxy-2'-fluorouridine-3'-phosphate
  modified_base 7: mod_base = OTHER; note = 2'-O-methyluridine-3'-phosphate
  modified_base 8: mod_base = OTHER; note = 2'-deoxy-2'-fluoroadenosine-3'-phosphate
  modified_base 9: mod_base = OTHER; note = 2'-deoxy-2'-fluoroadenosine-3'-phosphate
  modified_base 10: mod_base = OTHER; note = 2'-O-methyluridine-3'-phosphate
  modified_base 11: mod_base = OTHER; note = 2'-O-methyluridine-3'-phosphate
  modified_base 12: mod_base = OTHER; note = 2'-O-methyluridine-3'-phosphate
  modified_base 13: mod_base = OTHER; note = 2'-O-methylcytidine-3'-phosphate
  modified_base 14: mod_base = OTHER; note = 2'-deoxy-2'-fluoroadenosine-3'-phosphate
  modified_base 15: mod_base = OTHER; note = 2'-O-methylguanosine-3'-phosphate
  modified_base 16: mod_base = OTHER; note = 2'-deoxy-2'-fluorouridine-3'-phosphate
  modified_base 17: mod_base = OTHER; note = 2'-O-methylcytidine-3'-phosphate
  modified_base 18: mod_base = OTHER; note = 2'-O-methyladenosine-3'-phosphate
  modified_base 19: mod_base = OTHER; note = 2'-O-methylguanosine-3'-phosphate
  modified_base 20: mod_base = OTHER; note = 2'-O-methyladenosine-3'-phosphate
  modified_base 21: mod_base = OTHER; note = 2'-O-methyluridine-3'-phosphorothioate
  modified_base 22: mod_base = OTHER; note = 2'-O-methyladenosine-3'-phosphorothioate
  modified_base 23: mod_base = OTHER; note = 2'-O-methyluridine
ttcgtttaatttcagtcagatat

SEQ ID NO: 491 - RNA, 23 nt, synthetic construct
  source 1..23: mol_type = other RNA
atatctgactgaaattaaacgag

SEQ ID NO: 492 - RNA, 21 nt, synthetic construct
  source 1..21: mol_type = other RNA
  modified_base 1: mod_base = OTHER; note = 2'-O-methyladenosine-3'-phosphorothioate
  modified_base 2: mod_base = OTHER; note = 2'-O-methyladenosine-3'-phosphorothioate
  modified_base 3: mod_base = OTHER; note = 2'-O-methyluridine-3'-phosphate
  modified_base 4: mod_base = OTHER; note = 2'-O-methylcytidine-3'-phosphate
  modified_base 5: mod_base = OTHER; note = 2'-O-methyluridine-3'-phosphate
  modified_base 6: mod_base = OTHER; note = 2'-O-hexadecyl-cytidine-3'-phosphate
  modified_base 7: mod_base = OTHER; note = 2'-deoxy-2'-fluorocytidine-3'-phosphate
  modified_base 8: mod_base = OTHER; note = 2'-O-methyluridine-3'-phosphate
  modified_base 9: mod_base = OTHER; note = 2'-deoxy-2'-fluorouridine-3'-phosphate
  modified_base 10: mod_base = OTHER; note = 2'-deoxy-2'-fluorouridine-3'-phosphate
  modified_base 11: mod_base = OTHER; note = 2'-deoxy-2'-fluoroguanosine-3'-phosphate
  modified_base 12: mod_base = OTHER; note = 2'-O-methyluridine-3'-phosphate
  modified_base 13: mod_base = OTHER; note = 2'-O-methylcytidine-3'-phosphate
  modified_base 14: mod_base = OTHER; note = 2'-O-methylcytidine-3'-phosphate
  modified_base 15: mod_base = OTHER; note = 2'-O-methyladenosine-3'-phosphate
  modified_base 16: mod_base = OTHER; note = 2'-O-methyluridine-3'-phosphate
  modified_base 17: mod_base = OTHER; note = 2'-O-methyluridine-3'-phosphate
  modified_base 18: mod_base = OTHER; note = 2'-O-methyluridine-3'-phosphate
  modified_base 19: mod_base = OTHER; note = 2'-O-methyladenosine-3'-phosphorothioate
  modified_base 20: mod_base = OTHER; note = 2'-O-methylcytidine-3'-phosphorothioate
  modified_base 21: mod_base = OTHER; note = 2'-O-methyladenosine
aatctcctttgtccatttaca

SEQ ID NO: 493 - RNA, 23 nt, synthetic construct
  source 1..23: mol_type = other RNA
  modified_base 1: mod_base = OTHER; note = 2'-O-methyluridine-3'-phosphorothioate 5'-(E)-Vinylphosphonate
  modified_base 2: mod_base = OTHER; note = 2'-deoxy-2'-fluoroguanosine-3'-phosphorothioate
  modified_base 3: mod_base = OTHER; note = 2'-O-methyluridine-3'-phosphate
  modified_base 4: mod_base = OTHER; note = 2'-O-methyladenosine-3'-phosphate
  modified_base 5: mod_base = OTHER; note = 2'-O-methyladenosine-3'-phosphate
  modified_base 6: mod_base = OTHER; note = 2'-deoxy-2'-fluoroadenosine-3'-phosphate
  modified_base 7: mod_base = OTHER; note = 2'-O-methyluridine-3'-phosphate
  modified_base 8: mod_base = OTHER; note = 2'-deoxy-2'-fluoroguanosine-3'-phosphate
  modified_base 9: mod_base = OTHER; note = 2'-deoxy-2'-fluoroguanosine-3'-phosphate
  modified_base 10: mod_base = OTHER; note = 2'-O-methyladenosine-3'-phosphate
  modified_base 11: mod_base = OTHER; note = 2'-O-methylcytidine-3'-phosphate
  modified_base 12: mod_base = OTHER; note = 2'-O-methyladenosine-3'-phosphate
  modified_base 13: mod_base = OTHER; note = 2'-O-methyladenosine-3'-phosphate
  modified_base 14: mod_base = OTHER; note = 2'-deoxy-2'-fluoroadenosine-3'-phosphate
  modified_base 15: mod_base = OTHER; note = 2'-O-methylguanosine-3'-phosphate
  modified_base 16: mod_base = OTHER; note = 2'-deoxy-2'-fluoroguanosine-3'-phosphate
  modified_base 17: mod_base = OTHER; note = 2'-O-methyladenosine-3'-phosphate
  modified_base 18: mod_base = OTHER; note = 2'-O-methylguanosine-3'-phosphate
  modified_base 19: mod_base = OTHER; note = 2'-O-methyladenosine-3'-phosphate
  modified_base 20: mod_base = OTHER; note = 2'-O-methyluridine-3'-phosphate
  modified_base 21: mod_base = OTHER; note = 2'-O-methyluridine-3'-phosphorothioate
  modified_base 22: mod_base = OTHER; note = 2'-O-methyluridine-3'-phosphorothioate
  modified_base 23: mod_base = OTHER; note = 2'-O-methylguanosine
tgtaaatggacaaaggagatttg

SEQ ID NO: 494 - RNA, 23 nt, synthetic construct
  source 1..23: mol_type = other RNA
caaatctcctttgtccatttacc

SEQ ID NO: 495 - RNA, 21 nt, synthetic construct
  source 1..21: mol_type = other RNA
  modified_base 1: mod_base = OTHER; note = 2'-O-methyluridine-3'-phosphorothioate
  modified_base 2: mod_base = OTHER; note = 2'-O-methyluridine-3'-phosphorothioate
  modified_base 3: mod_base = OTHER; note = 2'-O-methyladenosine-3'-phosphate
  modified_base 4: mod_base = OTHER; note = 2'-O-methyladenosine-3'-phosphate
  modified_base 5: mod_base = OTHER; note = 2'-O-methylcytidine-3'-phosphate
  modified_base 6: mod_base = OTHER; note = 2'-O-hexadecyl-uridine-3'-phosphate
  modified_base 7: mod_base = OTHER; note = 2'-deoxy-2'-fluorouridine-3'-phosphate
  modified_base 8: mod_base = OTHER; note = 2'-O-methyluridine-3'-phosphate
  modified_base 9: mod_base = OTHER; note = 2'-deoxy-2'-fluorouridine-3'-phosphate
  modified_base 10: mod_base = OTHER; note = 2'-deoxy-2'-fluoroguanosine-3'-phosphate
  modified_base 11: mod_base = OTHER; note = 2'-deoxy-2'-fluorouridine-3'-phosphate
  modified_base 12: mod_base = OTHER; note = 2'-O-methyladenosine-3'-phosphate
  modified_base 13: mod_base = OTHER; note = 2'-O-methyladenosine-3'-phosphate
  modified_base 14: mod_base = OTHER; note = 2'-O-methylguanosine-3'-phosphate
  modified_base 15: mod_base = OTHER; note = 2'-O-methylguanosine-3'-phosphate
  modified_base 16: mod_base = OTHER; note = 2'-O-methyluridine-3'-phosphate
  modified_base 17: mod_base = OTHER; note = 2'-O-methyladenosine-3'-phosphate
  modified_base 18: mod_base = OTHER; note = 2'-O-methylcytidine-3'-phosphate
  modified_base 19: mod_base = OTHER; note = 2'-O-methyluridine-3'-phosphorothioate
  modified_base 20: mod_base = OTHER; note = 2'-O-methylguanosine-3'-phosphorothioate
  modified_base 21: mod_base = OTHER; note = 2'-O-methyladenosine
ttaacttttgtaaggtactga

SEQ ID NO: 496 - RNA, 23 nt, synthetic construct
  source 1..23: mol_type = other RNA
  modified_base 1: mod_base = OTHER; note = 2'-O-methyluridine-3'-phosphorothioate 5'-(E)-Vinylphosphonate
  modified_base 2: mod_base = OTHER; note = 2'-deoxy-2'-fluorocytidine-3'-phosphorothioate
  modified_base 3: mod_base = OTHER; note = 2'-O-methyladenosine-3'-phosphate
  modified_base 4: mod_base = OTHER; note = 2'-O-methylguanosine-3'-phosphate
  modified_base 5: mod_base = OTHER; note = 2'-O-methyluridine-3'-phosphate
  modified_base 6: mod_base = OTHER; note = 2'-deoxy-2'-fluoroadenosine-3'-phosphate
  modified_base 7: mod_base = OTHER; note = 2'-O-methylcytidine-3'-phosphate
  modified_base 8: mod_base = OTHER; note = 2'-deoxy-2'-fluorocytidine-3'-phosphate
  modified_base 9: mod_base = OTHER; note = 2'-deoxy-2'-fluorouridine-3'-phosphate
  modified_base 10: mod_base = OTHER; note = 2'-O-methyluridine-3'-phosphate
  modified_base 11: mod_base = OTHER; note = 2'-O-methyladenosine-3'-phosphate
  modified_base 12: mod_base = OTHER; note = 2'-O-methylcytidine-3'-phosphate
  modified_base 13: mod_base = OTHER; note = 2'-O-methyladenosine-3'-phosphate
  modified_base 14: mod_base = OTHER; note = 2'-deoxy-2'-fluoroadenosine-3'-phosphate
  modified_base 15: mod_base = OTHER; note = 2'-O-methyladenosine-3'-phosphate
  modified_base 16: mod_base = OTHER; note = 2'-deoxy-2'-fluoroadenosine-3'-phosphate
  modified_base 17: mod_base = OTHER; note = 2'-O-methylguanosine-3'-phosphate
  modified_base 18: mod_base = OTHER; note = 2'-O-methyluridine-3'-phosphate
  modified_base 19: mod_base = OTHER; note = 2'-O-methyluridine-3'-phosphate
  modified_base 20: mod_base = OTHER; note = 2'-O-methyladenosine-3'-phosphate
  modified_base 21: mod_base = OTHER; note = 2'-O-methyladenosine-3'-phosphorothioate
  modified_base 22: mod_base = OTHER; note = 2'-O-methyluridine-3'-phosphorothioate
  modified_base 23: mod_base = OTHER; note = 2'-O-methylguanosine
tcagtaccttacaaaagttaatg

SEQ ID NO: 497 - RNA, 23 nt, synthetic construct
  source 1..23: mol_type = other RNA
cattaacttttgtaaggtactga

SEQ ID NO: 498 - RNA, 21 nt, synthetic construct
  source 1..21: mol_type = other RNA
  modified_base 1: mod_base = OTHER; note = 2'-O-methylguanosine-3'-phosphorothioate
  modified_base 2: mod_base = OTHER; note = 2'-O-methylguanosine-3'-phosphorothioate
  modified_base 3: mod_base = OTHER; note = 2'-O-methyluridine-3'-phosphate
  modified_base 4: mod_base = OTHER; note = 2'-O-methylcytidine-3'-phosphate
  modified_base 5: mod_base = OTHER; note = 2'-O-methyladenosine-3'-phosphate
  modified_base 6: mod_base = OTHER; note = 2'-O-hexadecyl-adenosine-3'-phosphate
  modified_base 7: mod_base = OTHER; note = 2'-deoxy-2'-fluoroguanosine-3'-phosphate
  modified_base 8: mod_base = OTHER; note = 2'-O-methyluridine-3'-phosphate
  modified_base 9: mod_base = OTHER; note = 2'-deoxy-2'-fluorouridine-3'-phosphate
  modified_base 10: mod_base = OTHER; note = 2'-deoxy-2'-fluorocytidine-3'-phosphate
  modified_base 11: mod_base = OTHER; note = 2'-deoxy-2'-fluoroadenosine-3'-phosphate
  modified_base 12: mod_base = OTHER; note = 2'-O-methyluridine-3'-phosphate
  modified_base 13: mod_base = OTHER; note = 2'-O-methyladenosine-3'-phosphate
  modified_base 14: mod_base = OTHER; note = 2'-O-methylguanosine-3'-phosphate
  modified_base 15: mod_base = OTHER; note = 2'-O-methyluridine-3'-phosphate
  modified_base 16: mod_base = OTHER; note = 2'-O-methyluridine-3'-phosphate
  modified_base 17: mod_base = OTHER; note = 2'-O-methyluridine-3'-phosphate
  modified_base 18: mod_base = OTHER; note = 2'-O-methylcytidine-3'-phosphate
  modified_base 19: mod_base = OTHER; note = 2'-O-methyluridine-3'-phosphorothioate
  modified_base 20: mod_base = OTHER; note = 2'-O-methylguanosine-3'-phosphorothioate
  modified_base 21: mod_base = OTHER; note = 2'-O-methyladenosine
ggtcaagttcatagtttctga

SEQ ID NO: 499 - RNA, 23 nt, synthetic construct
  source 1..23: mol_type = other RNA
  modified_base 1: mod_base = OTHER; note = 2'-O-methyluridine-3'-phosphorothioate 5'-(E)-Vinylphosphonate
  modified_base 2: mod_base = OTHER; note = 2'-deoxy-2'-fluorocytidine-3'-phosphorothioate
  modified_base 3: mod_base = OTHER; note = 2'-O-methyladenosine-3'-phosphate
  modified_base 4: mod_base = OTHER; note = 2'-O-methylguanosine-3'-phosphate
  modified_base 5: mod_base = OTHER; note = 2'-O-methyladenosine-3'-phosphate
  modified_base 6: mod_base = OTHER; note = 2'-deoxy-2'-fluoroadenosine-3'-phosphate
  modified_base 7: mod_base = OTHER; note = 2'-O-methyladenosine-3'-phosphate
  modified_base 8: mod_base = OTHER; note = 2'-deoxy-2'-fluorocytidine-3'-phosphate
  modified_base 9: mod_base = OTHER; note = 2'-deoxy-2'-fluorouridine-3'-phosphate
  modified_base 10: mod_base = OTHER; note = 2'-O-methyladenosine-3'-phosphate
  modified_base 11: mod_base = OTHER; note = 2'-O-methyluridine-3'-phosphate
  modified_base 12: mod_base = OTHER; note = 2'-O-methylguanosine-3'-phosphate
  modified_base 13: mod_base = OTHER; note = 2'-O-methyladenosine-3'-phosphate
  modified_base 14: mod_base = OTHER; note = 2'-deoxy-2'-fluoroadenosine-3'-phosphate
  modified_base 15: mod_base = OTHER; note = 2'-O-methylcytidine-3'-phosphate
  modified_base 16: mod_base = OTHER; note = 2'-deoxy-2'-fluorouridine-3'-phosphate
  modified_base 17: mod_base = OTHER; note = 2'-O-methyluridine-3'-phosphate
  modified_base 18: mod_base = OTHER; note = 2'-O-methylguanosine-3'-phosphate
  modified_base 19: mod_base = OTHER; note = 2'-O-methyladenosine-3'-phosphate
  modified_base 20: mod_base = OTHER; note = 2'-O-methylcytidine-3'-phosphate
  modified_base 21: mod_base = OTHER; note = 2'-O-methylcytidine-3'-phosphorothioate
  modified_base 22: mod_base = OTHER; note = 2'-O-methyluridine-3'-phosphorothioate
  modified_base 23: mod_base = OTHER; note = 2'-O-methyladenosine
tcagaaactatgaacttgaccta

SEQ ID NO: 500 - RNA, 23 nt, synthetic construct
  source 1..23: mol_type = other RNA
taggtcaagttcatagtttctgt

SEQ ID NO: 501 - RNA, 21 nt, synthetic construct
  source 1..21: mol_type = other RNA
  modified_base 1: mod_base = OTHER; note = 2'-O-methylcytidine-3'-phosphorothioate
  modified_base 2: mod_base = OTHER; note = 2'-O-methyluridine-3'-phosphorothioate
  modified_base 3: mod_base = OTHER; note = 2'-O-methyladenosine-3'-phosphate
  modified_base 4: mod_base = OTHER; note = 2'-O-methyladenosine-3'-phosphate
  modified_base 5: mod_base = OTHER; note = 2'-O-methyluridine-3'-phosphate
  modified_base 6: mod_base = OTHER; note = 2'-O-hexadecyl-guanosine-3'-phosphate
  modified_base 7: mod_base = OTHER; note = 2'-deoxy-2'-fluorocytidine-3'-phosphate
  modified_base 8: mod_base = OTHER; note = 2'-O-methylcytidine-3'-phosphate
  modified_base 9: mod_base = OTHER; note = 2'-deoxy-2'-fluorocytidine-3'-phosphate
  modified_base 10: mod_base = OTHER; note = 2'-deoxy-2'-fluorouridine-3'-phosphate
  modified_base 11: mod_base = OTHER; note = 2'-deoxy-2'-fluoroadenosine-3'-phosphate
  modified_base 12: mod_base = OTHER; note = 2'-O-methyluridine-3'-phosphate
  modified_base 13: mod_base = OTHER; note = 2'-O-methylcytidine-3'-phosphate
  modified_base 14: mod_base = OTHER; note = 2'-O-methyluridine-3'-phosphate
  modified_base 15: mod_base = OTHER; note = 2'-O-methyluridine-3'-phosphate
  modified_base 16: mod_base = OTHER; note = 2'-O-methyladenosine-3'-phosphate
  modified_base 17: mod_base = OTHER; note = 2'-O-methylguanosine-3'-phosphate
  modified_base 18: mod_base = OTHER; note = 2'-O-methyluridine-3'-phosphate
  modified_base 19: mod_base = OTHER; note = 2'-O-methyladenosine-3'-phosphorothioate
  modified_base 20: mod_base = OTHER; note = 2'-O-methylguanosine-3'-phosphorothioate
  modified_base 21: mod_base = OTHER; note = 2'-O-methyladenosine
ctaatgccctatcttagtaga

SEQ ID NO: 502 - RNA, 23 nt, synthetic construct
  source 1..23: mol_type = other RNA
  modified_base 1: mod_base = OTHER; note = 2'-O-methyluridine-3'-phosphorothioate 5'-(E)-Vinylphosphonate
  modified_base 2: mod_base = OTHER; note = 2'-deoxy-2'-fluorocytidine-3'-phosphorothioate
  modified_base 3: mod_base = OTHER; note = 2'-O-methyluridine-3'-phosphate
  modified_base 4: mod_base = OTHER; note = 2'-O-methyladenosine-3'-phosphate
  modified_base 5: mod_base = OTHER; note = 2'-O-methylcytidine-3'-phosphate
  modified_base 6: mod_base = OTHER; note = 2'-deoxy-2'-fluorouridine-3'-phosphate
  modified_base 7: mod_base = OTHER; note = 2'-O-methyladenosine-3'-phosphate
  modified_base 8: mod_base = OTHER; note = 2'-deoxy-2'-fluoroadenosine-3'-phosphate
  modified_base 9: mod_base = OTHER; note = 2'-deoxy-2'-fluoroguanosine-3'-phosphate
  modified_base 10: mod_base = OTHER; note = 2'-O-methyladenosine-3'-phosphate
  modified_base 11: mod_base = OTHER; note = 2'-O-methyluridine-3'-phosphate
  modified_base 12: mod_base = OTHER; note = 2'-O-methyladenosine-3'-phosphate
  modified_base 13: mod_base = OTHER; note = 2'-O-methylguanosine-3'-phosphate
  modified_base 14: mod_base = OTHER; note = 2'-deoxy-2'-fluoroguanosine-3'-phosphate
  modified_base 15: mod_base = OTHER; note = 2'-O-methylguanosine-3'-phosphate
  modified_base 16: mod_base = OTHER; note = 2'-deoxy-2'-fluorocytidine-3'-phosphate
  modified_base 17: mod_base = OTHER; note = 2'-O-methyladenosine-3'-phosphate
  modified_base 18: mod_base = OTHER; note = 2'-O-methyluridine-3'-phosphate
  modified_base 19: mod_base = OTHER; note = 2'-O-methyluridine-3'-phosphate
  modified_base 20: mod_base = OTHER; note = 2'-O-methyladenosine-3'-phosphate
  modified_base 21: mod_base = OTHER; note = 2'-O-methylguanosine-3'-phosphorothioate
  modified_base 22: mod_base = OTHER; note = 2'-O-methyluridine-3'-phosphorothioate
  modified_base 23: mod_base = OTHER; note = 2'-O-methyladenosine
tctactaagatagggcattagta

SEQ ID NO: 503 - RNA, 23 nt, synthetic construct
  source 1..23: mol_type = other RNA
tactaatgccctatcttagtaga

SEQ ID NO: 504 - RNA, 21 nt, synthetic construct
  source 1..21: mol_type = other RNA
  modified_base 1: mod_base = OTHER; note = 2'-O-methyladenosine-3'-phosphorothioate
  modified_base 2: mod_base = OTHER; note = 2'-O-methylcytidine-3'-phosphorothioate
  modified_base 3: mod_base = OTHER; note = 2'-O-methyluridine-3'-phosphate
  modified_base 4: mod_base = OTHER; note = 2'-O-methyluridine-3'-phosphate
  modified_base 5: mod_base = OTHER; note = 2'-O-methyladenosine-3'-phosphate
  modified_base 6: mod_base = OTHER; note = 2'-O-hexadecyl-guanosine-3'-phosphate
  modified_base 7: mod_base = OTHER; note = 2'-deoxy-2'-fluorouridine-3'-phosphate
  modified_base 8: mod_base = OTHER; note = 2'-O-methylguanosine-3'-phosphate
  modified_base 9: mod_base = OTHER; note = 2'-deoxy-2'-fluorocytidine-3'-phosphate
  modified_base 10: mod_base = OTHER; note = 2'-deoxy-2'-fluoroadenosine-3'-phosphate
  modified_base 11: mod_base = OTHER; note = 2'-deoxy-2'-fluoroadenosine-3'-phosphate
  modified_base 12: mod_base = OTHER; note = 2'-O-methylcytidine-3'-phosphate
  modified_base 13: mod_base = OTHER; note = 2'-O-methyladenosine-3'-phosphate
  modified_base 14: mod_base = OTHER; note = 2'-O-methylguanosine-3'-phosphate
  modified_base 15: mod_base = OTHER; note = 2'-O-methylguanosine-3'-phosphate
  modified_base 16: mod_base = OTHER; note = 2'-O-methyluridine-3'-phosphate
  modified_base 17: mod_base = OTHER; note = 2'-O-methyluridine-3'-phosphate
  modified_base 18: mod_base = OTHER; note = 2'-O-methylguanosine-3'-phosphate
  modified_base 19: mod_base = OTHER; note = 2'-O-methyladenosine-3'-phosphorothioate
  modified_base 20: mod_base = OTHER; note = 2'-O-methylguanosine-3'-phosphorothioate
  modified_base 21: mod_base = OTHER; note = 2'-O-methyladenosine
acttagtgcaacaggttgaga

SEQ ID NO: 505 - RNA, 23 nt, synthetic construct
  source 1..23: mol_type = other RNA
  modified_base 1: mod_base = OTHER; note = 2'-O-methyluridine-3'-phosphorothioate 5'-(E)-Vinylphosphonate
  modified_base 2: mod_base = OTHER; note = 2'-deoxy-2'-fluorocytidine-3'-phosphorothioate
  modified_base 3: mod_base = OTHER; note = 2'-O-methyluridine-3'-phosphate
  modified_base 4: mod_base = OTHER; note = 2'-O-methylcytidine-3'-phosphate
  modified_base 5: mod_base = OTHER; note = 2'-O-methyladenosine-3'-phosphate
  modified_base 6: mod_base = OTHER; note = 2'-deoxy-2'-fluoroadenosine-3'-phosphate
  modified_base 7: mod_base = OTHER; note = 2'-O-methylcytidine-3'-phosphate
  modified_base 8: mod_base = OTHER; note = 2'-deoxy-2'-fluorocytidine-3'-phosphate
  modified_base 9: mod_base = OTHER; note = 2'-deoxy-2'-fluorouridine-3'-phosphate
  modified_base 10: mod_base = OTHER; note = 2'-O-methylguanosine-3'-phosphate
  modified_base 11: mod_base = OTHER; note = 2'-O-methyluridine-3'-phosphate
  modified_base 12: mod_base = OTHER; note = 2'-O-methyluridine-3'-phosphate
  modified_base 13: mod_base = OTHER; note = 2'-O-methylguanosine-3'-phosphate
  modified_base 14: mod_base = OTHER; note = 2'-deoxy-2'-fluorocytidine-3'-phosphate
  modified_base 15: mod_base = OTHER; note = 2'-O-methyladenosine-3'-phosphate
  modified_base 16: mod_base = OTHER; note = 2'-deoxy-2'-fluorocytidine-3'-phosphate
  modified_base 17: mod_base = OTHER; note = 2'-O-methyluridine-3'-phosphate
  modified_base 18: mod_base = OTHER; note = 2'-O-methyladenosine-3'-phosphate
  modified_base 19: mod_base = OTHER; note = 2'-O-methyladenosine-3'-phosphate
  modified_base 20: mod_base = OTHER; note = 2'-O-methylguanosine-3'-phosphate
  modified_base 21: mod_base = OTHER; note = 2'-O-methyluridine-3'-phosphorothioate
  modified_base 22: mod_base = OTHER; note = 2'-O-methylcytidine-3'-phosphorothioate
  modified_base 23: mod_base = OTHER; note = 2'-O-methylcytidine
tctcaacctgttgcactaagtcc

SEQ ID NO: 506 - RNA, 23 nt, synthetic construct
  source 1..23: mol_type = other RNA
ggacttagtgcaacaggttgagg

SEQ ID NO: 507 - RNA, 21 nt, synthetic construct
  source 1..21: mol_type = other RNA
  modified_base 1: mod_base = OTHER; note = 2'-O-methyluridine-3'-phosphorothioate
  modified_base 2: mod_base = OTHER; note = 2'-O-methyluridine-3'-phosphorothioate
  modified_base 3: mod_base = OTHER; note = 2'-O-methylcytidine-3'-phosphate
  modified_base 4: mod_base = OTHER; note = 2'-O-methyluridine-3'-phosphate
  modified_base 5: mod_base = OTHER; note = 2'-O-methyladenosine-3'-phosphate
  modified_base 6: mod_base = OTHER; note = 2'-O-hexadecyl-uridine-3'-phosphate
  modified_base 7: mod_base = OTHER; note = 2'-deoxy-2'-fluoroadenosine-3'-phosphate
  modified_base 8: mod_base = OTHER; note = 2'-O-methyluridine-3'-phosphate
  modified_base 9: mod_base = OTHER; note = 2'-deoxy-2'-fluorouridine-3'-phosphate
  modified_base 10: mod_base = OTHER; note = 2'-deoxy-2'-fluorouridine-3'-phosphate
  modified_base 11: mod_base = OTHER; note = 2'-deoxy-2'-fluoroguanosine-3'-phosphate
  modified_base 12: mod_base = OTHER; note = 2'-O-methyluridine-3'-phosphate
  modified_base 13: mod_base = OTHER; note = 2'-O-methyladenosine-3'-phosphate
  modified_base 14: mod_base = OTHER; note = 2'-O-methyladenosine-3'-phosphate
  modified_base 15: mod_base = OTHER; note = 2'-O-methylcytidine-3'-phosphate
  modified_base 16: mod_base = OTHER; note = 2'-O-methyluridine-3'-phosphate
  modified_base 17: mod_base = OTHER; note = 2'-O-methyluridine-3'-phosphate
  modified_base 18: mod_base = OTHER; note = 2'-O-methyluridine-3'-phosphate
  modified_base 19: mod_base = OTHER; note = 2'-O-methylguanosine-3'-phosphorothioate
  modified_base 20: mod_base = OTHER; note = 2'-O-methylcytidine-3'-phosphorothioate
  modified_base 21: mod_base = OTHER; note = 2'-O-methyladenosine
ttctatatttgtaactttgca

SEQ ID NO: 508 - RNA, 23 nt, synthetic construct
  source 1..23: mol_type = other RNA
  modified_base 1: mod_base = OTHER; note = 2'-O-methyluridine-3'-phosphorothioate 5'-(E)-Vinylphosphonate
  modified_base 2: mod_base = OTHER; note = 2'-deoxy-2'-fluoroguanosine-3'-phosphorothioate
  modified_base 3: mod_base = OTHER; note = 2'-O-methylcytidine-3'-phosphate
  modified_base 4: mod_base = OTHER; note = 2'-O-methyladenosine-3'-phosphate
  modified_base 5: mod_base = OTHER; note = 2'-O-methyladenosine-3'-phosphate
  modified_base 6: mod_base = OTHER; note = 2'-deoxy-2'-fluoroadenosine-3'-phosphate
  modified_base 7: mod_base = OTHER; note = 2'-O-methylguanosine-3'-phosphate
  modified_base 8: mod_base = OTHER; note = 2'-deoxy-2'-fluorouridine-3'-phosphate
  modified_base 9: mod_base = OTHER; note = 2'-deoxy-2'-fluorouridine-3'-phosphate
  modified_base 10: mod_base = OTHER; note = 2'-O-methyladenosine-3'-phosphate
  modified_base 11: mod_base = OTHER; note = 2'-O-methylcytidine-3'-phosphate
  modified_base 12: mod_base = OTHER; note = 2'-O-methyladenosine-3'-phosphate
  modified_base 13: mod_base = OTHER; note = 2'-O-methyladenosine-3'-phosphate
  modified_base 14: mod_base = OTHER; note = 2'-deoxy-2'-fluoroadenosine-3'-phosphate
  modified_base 15: mod_base = OTHER; note = 2'-O-methyluridine-3'-phosphate
  modified_base 16: mod_base = OTHER; note = 2'-deoxy-2'-fluoroadenosine-3'-phosphate
  modified_base 17: mod_base = OTHER; note = 2'-O-methyluridine-3'-phosphate
  modified_base 18: mod_base = OTHER; note = 2'-O-methyladenosine-3'-phosphate
  modified_base 19: mod_base = OTHER; note = 2'-O-methylguanosine-3'-phosphate
  modified_base 20: mod_base = OTHER; note = 2'-O-methyladenosine-3'-phosphate
  modified_base 21: mod_base = OTHER; note = 2'-O-methyladenosine-3'-phosphorothioate
  modified_base 22: mod_base = OTHER; note = 2'-O-methyladenosine-3'-phosphorothioate
  modified_base 23: mod_base = OTHER; note = 2'-O-methyladenosine
tgcaaagttacaaatatagaaaa

SEQ ID NO: 509 - RNA, 23 nt, synthetic construct
  source 1..23: mol_type = other RNA
ttttctatatttgtaactttgca

SEQ ID NO: 510 - RNA, 21 nt, synthetic construct
  source 1..21: mol_type = other RNA
  modified_base 1: mod_base = OTHER; note = 2'-O-methyluridine-3'-phosphorothioate
  modified_base 2: mod_base = OTHER; note = 2'-O-methyladenosine-3'-phosphorothioate
  modified_base 3: mod_base = OTHER; note = 2'-O-methyladenosine-3'-phosphate
  modified_base 4: mod_base = OTHER; note = 2'-O-methyluridine-3'-phosphate
  modified_base 5: mod_base = OTHER; note = 2'-O-methylcytidine-3'-phosphate
  modified_base 6: mod_base = OTHER; note = 2'-O-hexadecyl-uridine-3'-phosphate
  modified_base 7: mod_base = OTHER; note = 2'-deoxy-2'-fluorouridine-3'-phosphate
  modified_base 8: mod_base = OTHER; note = 2'-O-methyluridine-3'-phosphate
  modified_base 9: mod_base = OTHER; note = 2'-deoxy-2'-fluorouridine-3'-phosphate
  modified_base 10: mod_base = OTHER; note = 2'-deoxy-2'-fluorouridine-3'-phosphate
  modified_base 11: mod_base = OTHER; note = 2'-deoxy-2'-fluorocytidine-3'-phosphate
  modified_base 12: mod_base = OTHER; note = 2'-O-methylcytidine-3'-phosphate
  modified_base 13: mod_base = OTHER; note = 2'-O-methyladenosine-3'-phosphate
  modified_base 14: mod_base = OTHER; note = 2'-O-methylguanosine-3'-phosphate
  modified_base 15: mod_base = OTHER; note = 2'-O-methylcytidine-3'-phosphate
  modified_base 16: mod_base = OTHER; note = 2'-O-methyluridine-3'-phosphate
  modified_base 17: mod_base = OTHER; note = 2'-O-methyluridine-3'-phosphate
  modified_base 18: mod_base = OTHER; note = 2'-O-methylguanosine-3'-phosphate
  modified_base 19: mod_base = OTHER; note = 2'-O-methyladenosine-3'-phosphorothioate
  modified_base 20: mod_base = OTHER; note = 2'-O-methylguanosine-3'-phosphorothioate
  modified_base 21: mod_base = OTHER; note = 2'-O-methyladenosine
taatctttttccagcttgaga

SEQ ID NO: 511 - RNA, 23 nt, synthetic construct
  source 1..23: mol_type = other RNA
  modified_base 1: mod_base = OTHER; note = 2'-O-methyluridine-3'-phosphorothioate 5'-(E)-Vinylphosphonate
  modified_base 2: mod_base = OTHER; note = 2'-deoxy-2'-fluorocytidine-3'-phosphorothioate
  modified_base 3: mod_base = OTHER; note = 2'-O-methyluridine-3'-phosphate
  modified_base 4: mod_base = OTHER; note = 2'-O-methylcytidine-3'-phosphate
  modified_base 5: mod_base = OTHER; note = 2'-O-methyladenosine-3'-phosphate
  modified_base 6: mod_base = OTHER; note = 2'-deoxy-2'-fluoroadenosine-3'-phosphate
  modified_base 7: mod_base = OTHER; note = 2'-O-methylguanosine-3'-phosphate
  modified_base 8: mod_base = OTHER; note = 2'-deoxy-2'-fluorocytidine-3'-phosphate
  modified_base 9: mod_base = OTHER; note = 2'-deoxy-2'-fluorouridine-3'-phosphate
  modified_base 10: mod_base = OTHER; note = 2'-O-methylguanosine-3'-phosphate
  modified_base 11: mod_base = OTHER; note = 2'-O-methylguanosine-3'-phosphate
  modified_base 12: mod_base = OTHER; note = 2'-O-methyladenosine-3'-phosphate
  modified_base 13: mod_base = OTHER; note = 2'-O-methyladenosine-3'-phosphate
  modified_base 14: mod_base = OTHER; note = 2'-deoxy-2'-fluoroadenosine-3'-phosphate
  modified_base 15: mod_base = OTHER; note = 2'-O-methyladenosine-3'-phosphate
  modified_base 16: mod_base = OTHER; note = 2'-deoxy-2'-fluoroadenosine-3'-phosphate
  modified_base 17: mod_base = OTHER; note = 2'-O-methylguanosine-3'-phosphate
  modified_base 18: mod_base = OTHER; note = 2'-O-methyladenosine-3'-phosphate
  modified_base 19: mod_base = OTHER; note = 2'-O-methyluridine-3'-phosphate
  modified_base 20: mod_base = OTHER; note = 2'-O-methyluridine-3'-phosphate
  modified_base 21: mod_base = OTHER; note = 2'-O-methyladenosine-3'-phosphorothioate
  modified_base 22: mod_base = OTHER; note = 2'-O-methylguanosine-3'-phosphorothioate
  modified_base 23: mod_base = OTHER; note = 2'-O-methyladenosine
tctcaagctggaaaaagattaga

SEQ ID NO: 512 - RNA, 23 nt, synthetic construct
  source 1..23: mol_type = other RNA
tctaatctttttccagcttgagg

SEQ ID NO: 513 - RNA, 21 nt, synthetic construct
  source 1..21: mol_type = other RNA
  modified_base 1: mod_base = OTHER; note = 2'-O-methyladenosine-3'-phosphorothioate
  modified_base 2: mod_base = OTHER; note = 2'-O-methylguanosine-3'-phosphorothioate
  modified_base 3: mod_base = OTHER; note = 2'-O-methyladenosine-3'-phosphate
  modified_base 4: mod_base = OTHER; note = 2'-O-methylcytidine-3'-phosphate
  modified_base 5: mod_base = OTHER; note = 2'-O-methyladenosine-3'-phosphate
  modified_base 6: mod_base = OTHER; note = 2'-O-hexadecyl-cytidine-3'-phosphate
  modified_base 7: mod_base = OTHER; note = 2'-deoxy-2'-fluorouridine-3'-phosphate
  modified_base 8: mod_base = OTHER; note = 2'-O-methylguanosine-3'-phosphate
  modified_base 9: mod_base = OTHER; note = 2'-deoxy-2'-fluoroadenosine-3'-phosphate
  modified_base 10: mod_base = OTHER; note = 2'-deoxy-2'-fluoroadenosine-3'-phosphate
  modified_base 11: mod_base = OTHER; note = 2'-deoxy-2'-fluoroguanosine-3'-phosphate
  modified_base 12: mod_base = OTHER; note = 2'-O-methylguanosine-3'-phosphate
  modified_base 13: mod_base = OTHER; note = 2'-O-methylcytidine-3'-phosphate
  modified_base 14: mod_base = OTHER; note = 2'-O-methyladenosine-3'-phosphate
  modified_base 15: mod_base = OTHER; note = 2'-O-methyladenosine-3'-phosphate
  modified_base 16: mod_base = OTHER; note = 2'-O-methyladenosine-3'-phosphate
  modified_base 17: mod_base = OTHER; note = 2'-O-methyluridine-3'-phosphate
  modified_base 18: mod_base = OTHER; note = 2'-O-methylcytidine-3'-phosphate
  modified_base 19: mod_base = OTHER; note = 2'-O-methyluridine-3'-phosphorothioate
  modified_base 20: mod_base = OTHER; note = 2'-O-methylcytidine-3'-phosphorothioate
  modified_base 21: mod_base = OTHER; note = 2'-O-methyladenosine
agacactgaaggcaaatctca

SEQ ID NO: 514 - RNA, 23 nt, synthetic construct
  source 1..23: mol_type = other RNA
  modified_base 1: mod_base = OTHER; note = 2'-O-methyluridine-3'-phosphorothioate 5'-(E)-Vinylphosphonate
  modified_base 2: mod_base = OTHER; note = 2'-deoxy-2'-fluoroguanosine-3'-phosphorothioate
  modified_base 3: mod_base = OTHER; note = 2'-O-methyladenosine-3'-phosphate
  modified_base 4: mod_base = OTHER; note = 2'-O-methylguanosine-3'-phosphate
  modified_base 5: mod_base = OTHER; note = 2'-O-methyladenosine-3'-phosphate
  modified_base 6: mod_base = OTHER; note = 2'-deoxy-2'-fluorouridine-3'-phosphate
  modified_base 7: mod_base = OTHER; note = 2'-O-methyluridine-3'-phosphate
  modified_base 8: mod_base = OTHER; note = 2'-deoxy-2'-fluorouridine-3'-phosphate
  modified_base 9: mod_base = OTHER; note = 2'-deoxy-2'-fluoroguanosine-3'-phosphate
  modified_base 10: mod_base = OTHER; note = 2'-O-methylcytidine-3'-phosphate
  modified_base 11: mod_base = OTHER; note = 2'-O-methylcytidine-3'-phosphate
  modified_base 12: mod_base = OTHER; note = 2'-O-methyluridine-3'-phosphate
  modified_base 13: mod_base = OTHER; note = 2'-O-methyluridine-3'-phosphate
  modified_base 14: mod_base = OTHER; note = 2'-deoxy-2'-fluorocytidine-3'-phosphate
  modified_base 15: mod_base = OTHER; note = 2'-O-methyladenosine-3'-phosphate
  modified_base 16: mod_base = OTHER; note = 2'-deoxy-2'-fluoroguanosine-3'-phosphate
  modified_base 17: mod_base = OTHER; note = 2'-O-methyluridine-3'-phosphate
  modified_base 18: mod_base = OTHER; note = 2'-O-methylguanosine-3'-phosphate
  modified_base 19: mod_base = OTHER; note = 2'-O-methyluridine-3'-phosphate
  modified_base 20: mod_base = OTHER; note = 2'-O-methylcytidine-3'-phosphate
  modified_base 21: mod_base = OTHER; note = 2'-O-methyluridine-3'-phosphorothioate
  modified_base 22: mod_base = OTHER; note = 2'-O-methyladenosine-3'-phosphorothioate
  modified_base 23: mod_base = OTHER; note = 2'-O-methylguanosine
tgagatttgccttcagtgtctag

SEQ ID NO: 515 - RNA, 23 nt, synthetic construct
  source 1..23: mol_type = other RNA
ctagacactgaaggcaaatctcc

SEQ ID NO: 516 - RNA, 21 nt, synthetic construct
  source 1..21: mol_type = other RNA
  modified_base 1: mod_base = OTHER; note = 2'-O-methylguanosine-3'-phosphorothioate
  modified_base 2: mod_base = OTHER; note = 2'-O-methyluridine-3'-phosphorothioate
  modified_base 3: mod_base = OTHER; note = 2'-O-methylguanosine-3'-phosphate
  modified_base 4: mod_base = OTHER; note = 2'-O-methylguanosine-3'-phosphate
  modified_base 5: mod_base = OTHER; note = 2'-O-methyluridine-3'-phosphate
  modified_base 6: mod_base = OTHER; note = 2'-O-hexadecyl-cytidine-3'-phosphate
  modified_base 7: mod_base = OTHER; note = 2'-deoxy-2'-fluorocytidine-3'-phosphate
  modified_base 8: mod_base = OTHER; note = 2'-O-methyluridine-3'-phosphate
  modified_base 9: mod_base = OTHER; note = 2'-deoxy-2'-fluorouridine-3'-phosphate
  modified_base 10: mod_base = OTHER; note = 2'-deoxy-2'-fluoroadenosine-3'-phosphate
  modified_base 11: mod_base = OTHER; note = 2'-deoxy-2'-fluoroguanosine-3'-phosphate
  modified_base 12: mod_base = OTHER; note = 2'-O-methylguanosine-3'-phosphate
  modified_base 13: mod_base = OTHER; note = 2'-O-methylcytidine-3'-phosphate
  modified_base 14: mod_base = OTHER; note = 2'-O-methyluridine-3'-phosphate
  modified_base 15: mod_base = OTHER; note = 2'-O-methyluridine-3'-phosphate
  modified_base 16: mod_base = OTHER; note = 2'-O-methyladenosine-3'-phosphate
  modified_base 17: mod_base = OTHER; note = 2'-O-methylcytidine-3'-phosphate
  modified_base 18: mod_base = OTHER; note = 2'-O-methyladenosine-3'-phosphate
  modified_base 19: mod_base = OTHER; note = 2'-O-methyladenosine-3'-phosphorothioate
  modified_base 20: mod_base = OTHER; note = 2'-O-methyluridine-3'-phosphorothioate
  modified_base 21: mod_base = OTHER; note = 2'-O-methyladenosine
gtggtccttaggcttacaata

SEQ ID NO: 517 - RNA, 23 nt, synthetic construct
  source 1..23: mol_type = other RNA
  modified_base 1: mod_base = OTHER; note = 2'-O-methyluridine-3'-phosphorothioate 5'-(E)-Vinylphosphonate
  modified_base 2: mod_base = OTHER; note = 2'-deoxy-2'-fluoroadenosine-3'-phosphorothioate
  modified_base 3: mod_base = OTHER; note = 2'-O-methyluridine-3'-phosphate
  modified_base 4: mod_base = OTHER; note = 2'-O-methyluridine-3'-phosphate
  modified_base 5: mod_base = OTHER; note = 2'-O-methylguanosine-3'-phosphate
  modified_base 6: mod_base = OTHER; note = 2'-deoxy-2'-fluorouridine-3'-phosphate
  modified_base 7: mod_base = OTHER; note = 2'-O-methyladenosine-3'-phosphate
  modified_base 8: mod_base = OTHER; note = 2'-deoxy-2'-fluoroadenosine-3'-phosphate
  modified_base 9: mod_base = OTHER; note = 2'-deoxy-2'-fluoroguanosine-3'-phosphate
  modified_base 10: mod_base = OTHER; note = 2'-O-methylcytidine-3'-phosphate
  modified_base 11: mod_base = OTHER; note = 2'-O-methylcytidine-3'-phosphate
  modified_base 12: mod_base = OTHER; note = 2'-O-methyluridine-3'-phosphate
  modified_base 13: mod_base = OTHER; note = 2'-O-methyladenosine-3'-phosphate
  modified_base 14: mod_base = OTHER; note = 2'-deoxy-2'-fluoroadenosine-3'-phosphate
  modified_base 15: mod_base = OTHER; note = 2'-O-methylguanosine-3'-phosphate
  modified_base 16: mod_base = OTHER; note = 2'-deoxy-2'-fluoroguanosine-3'-phosphate
  modified_base 17: mod_base = OTHER; note = 2'-O-methyladenosine-3'-phosphate
  modified_base 18: mod_base = OTHER; note = 2'-O-methylcytidine-3'-phosphate
  modified_base 19: mod_base = OTHER; note = 2'-O-methylcytidine-3'-phosphate
  modified_base 20: mod_base = OTHER; note = 2'-O-methyladenosine-3'-phosphate
  modified_base 21: mod_base = OTHER; note = 2'-O-methylcytidine-3'-phosphorothioate
  modified_base 22: mod_base = OTHER; note = 2'-O-methylguanosine-3'-phosphorothioate
  modified_base 23: mod_base = OTHER; note = 2'-O-methylcytidine
tattgtaagcctaaggaccacgc

SEQ ID NO: 518 - RNA, 23 nt, synthetic construct
  source 1..23: mol_type = other RNA
gcgtggtccttaggcttacaatg

SEQ ID NO: 519 - RNA, 21 nt, synthetic construct
  source 1..21: mol_type = other RNA
  modified_base 1: mod_base = OTHER; note = 2'-O-methyladenosine-3'-phosphorothioate
  modified_base 2: mod_base = OTHER; note = 2'-O-methylcytidine-3'-phosphorothioate
  modified_base 3: mod_base = OTHER; note = 2'-O-methyluridine-3'-phosphate
  modified_base 4: mod_base = OTHER; note = 2'-O-methyluridine-3'-phosphate
  modified_base 5: mod_base = OTHER; note = 2'-O-methyladenosine-3'-phosphate
  modified_base 6: mod_base = OTHER; note = 2'-O-hexadecyl-uridine-3'-phosphate
  modified_base 7: mod_base = OTHER; note = 2'-deoxy-2'-fluorouridine-3'-phosphate
  modified_base 8: mod_base = OTHER; note = 2'-O-methyluridine-3'-phosphate
  modified_base 9: mod_base = OTHER; note = 2'-deoxy-2'-fluorouridine-3'-phosphate
  modified_base 10: mod_base = OTHER; note = 2'-deoxy-2'-fluorouridine-3'-phosphate
  modified_base 11: mod_base = OTHER; note = 2'-deoxy-2'-fluoroguanosine-3'-phosphate
  modified_base 12: mod_base = OTHER; note = 2'-O-methylguanosine-3'-phosphate
  modified_base 13: mod_base = OTHER; note = 2'-O-methyladenosine-3'-phosphate
  modified_base 14: mod_base = OTHER; note = 2'-O-methylcytidine-3'-phosphate
  modified_base 15: mod_base = OTHER; note = 2'-O-methyluridine-3'-phosphate
  modified_base 16: mod_base = OTHER; note = 2'-O-methyluridine-3'-phosphate
  modified_base 17: mod_base = OTHER; note = 2'-O-methyladenosine-3'-phosphate
  modified_base 18: mod_base = OTHER; note = 2'-O-methylguanosine-3'-phosphate
  modified_base 19: mod_base = OTHER; note = 2'-O-methyluridine-3'-phosphorothioate
  modified_base 20: mod_base = OTHER; note = 2'-O-methylguanosine-3'-phosphorothioate
  modified_base 21: mod_base = OTHER; note = 2'-O-methyladenosine
acttatttttggacttagtga

SEQ ID NO: 520 - RNA, 23 nt, synthetic construct
  source 1..23: mol_type = other RNA
  modified_base 1: mod_base = OTHER; note = 2'-O-methyluridine-3'-phosphorothioate 5'-(E)-Vinylphosphonate
  modified_base 2: mod_base = OTHER; note = 2'-deoxy-2'-fluorocytidine-3'-phosphorothioate
  modified_base 3: mod_base = OTHER; note = 2'-O-methyladenosine-3'-phosphate
  modified_base 4: mod_base = OTHER; note = 2'-O-methylcytidine-3'-phosphate
  modified_base 5: mod_base = OTHER; note = 2'-O-methyluridine-3'-phosphate
  modified_base 6: mod_base = OTHER; note = 2'-deoxy-2'-fluoroadenosine-3'-phosphate
  modified_base 7: mod_base = OTHER; note = 2'-O-methyladenosine-3'-phosphate
  modified_base 8: mod_base = OTHER; note = 2'-deoxy-2'-fluoroguanosine-3'-phosphate
  modified_base 9: mod_base = OTHER; note = 2'-deoxy-2'-fluorouridine-3'-phosphate
  modified_base 10: mod_base = OTHER; note = 2'-O-methylcytidine-3'-phosphate
  modified_base 11: mod_base = OTHER; note = 2'-O-methylcytidine-3'-phosphate
  modified_base 12: mod_base = OTHER; note = 2'-O-methyladenosine-3'-phosphate
  modified_base 13: mod_base = OTHER; note = 2'-O-methyladenosine-3'-phosphate
  modified_base 14: mod_base = OTHER; note = 2'-deoxy-2'-fluoroadenosine-3'-phosphate
  modified_base 15: mod_base = OTHER; note = 2'-O-methyladenosine-3'-phosphate
  modified_base 16: mod_base = OTHER; note = 2'-deoxy-2'-fluoroadenosine-3'-phosphate
  modified_base 17: mod_base = OTHER; note = 2'-O-methyluridine-3'-phosphate
  modified_base 18: mod_base = OTHER; note = 2'-O-methyladenosine-3'-phosphate
  modified_base 19: mod_base = OTHER; note = 2'-O-methyladenosine-3'-phosphate
  modified_base 20: mod_base = OTHER; note = 2'-O-methylguanosine-3'-phosphate
  modified_base 21: mod_base = OTHER; note = 2'-O-methyluridine-3'-phosphorothioate
  modified_base 22: mod_base = OTHER; note = 2'-O-methylcytidine-3'-phosphorothioate
  modified_base 23: mod_base = OTHER; note = 2'-O-methylcytidine
tcactaagtccaaaaataagtcc

SEQ ID NO: 521 - RNA, 23 nt, synthetic construct
  source 1..23: mol_type = other RNA
ggacttatttttggacttagtgc

SEQ ID NO: 522 - RNA, 21 nt, synthetic construct
  source 1..21: mol_type = other RNA
  modified_base 1: mod_base = OTHER; note = 2'-O-methylguanosine-3'-phosphorothioate
  modified_base 2: mod_base = OTHER; note = 2'-O-methylcytidine-3'-phosphorothioate
  modified_base 3: mod_base = OTHER; note = 2'-O-methyladenosine-3'-phosphate
  modified_base 4: mod_base = OTHER; note = 2'-O-methylcytidine-3'-phosphate
  modified_base 5: mod_base = OTHER; note = 2'-O-methylguanosine-3'-phosphate
  modified_base 6: mod_base = OTHER; note = 2'-O-hexadecyl-adenosine-3'-phosphate
  modified_base 7: mod_base = OTHER; note = 2'-deoxy-2'-fluorocytidine-3'-phosphate
  modified_base 8: mod_base = OTHER; note = 2'-O-methyluridine-3'-phosphate
  modified_base 9: mod_base = OTHER; note = 2'-deoxy-2'-fluoroguanosine-3'-phosphate
  modified_base 10: mod_base = OTHER; note = 2'-deoxy-2'-fluorocytidine-3'-phosphate
  modified_base 11: mod_base = OTHER; note = 2'-deoxy-2'-fluoroguanosine-3'-phosphate
  modified_base 12: mod_base = OTHER; note = 2'-O-methyluridine-3'-phosphate
  modified_base 13: mod_base = OTHER; note = 2'-O-methylcytidine-3'-phosphate
  modified_base 14: mod_base = OTHER; note = 2'-O-methyladenosine-3'-phosphate
  modified_base 15: mod_base = OTHER; note = 2'-O-methyladenosine-3'-phosphate
  modified_base 16: mod_base = OTHER; note = 2'-O-methyluridine-3'-phosphate
  modified_base 17: mod_base = OTHER; note = 2'-O-methyladenosine-3'-phosphate
  modified_base 18: mod_base = OTHER; note = 2'-O-methyluridine-3'-phosphate
  modified_base 19: mod_base = OTHER; note = 2'-O-methylcytidine-3'-phosphorothioate
  modified_base 20: mod_base = OTHER; note = 2'-O-methyladenosine-3'-phosphorothioate
  modified_base 21: mod_base = OTHER; note = 2'-O-methyladenosine
gcacgactgcgtcaatatcaa

SEQ ID NO: 523 - RNA, 23 nt, synthetic construct
  source 1..23: mol_type = other RNA
  modified_base 1: mod_base = OTHER; note = 2'-O-methyluridine-3'-phosphorothioate 5'-(E)-Vinylphosphonate
  modified_base 2: mod_base = OTHER; note = 2'-deoxy-2'-fluorouridine-3'-phosphorothioate
  modified_base 3: mod_base = OTHER; note = 2'-O-methylguanosine-3'-phosphate
  modified_base 4: mod_base = OTHER; note = 2'-O-methyladenosine-3'-phosphate
  modified_base 5: mod_base = OTHER; note = 2'-O-methyluridine-3'-phosphate
  modified_base 6: mod_base = OTHER; note = 2'-deoxy-2'-fluoroadenosine-3'-phosphate
  modified_base 7: mod_base = OTHER; note = 2'-O-methyluridine-3'-phosphate
  modified_base 8: mod_base = OTHER; note = 2'-deoxy-2'-fluorouridine-3'-phosphate
  modified_base 9: mod_base = OTHER; note = 2'-deoxy-2'-fluoroguanosine-3'-phosphate
  modified_base 10: mod_base = OTHER; note = 2'-O-methyladenosine-3'-phosphate
  modified_base 11: mod_base = OTHER; note = 2'-O-methylcytidine-3'-phosphate
  modified_base 12: mod_base = OTHER; note = 2'-O-methylguanosine-3'-phosphate
  modified_base 13: mod_base = OTHER; note = 2'-O-methylcytidine-3'-phosphate
  modified_base 14: mod_base = OTHER; note = 2'-deoxy-2'-fluoroadenosine-3'-phosphate
  modified_base 15: mod_base = OTHER; note = 2'-O-methylguanosine-3'-phosphate
  modified_base 16: mod_base = OTHER; note = 2'-deoxy-2'-fluorouridine-3'-phosphate
  modified_base 17: mod_base = OTHER; note = 2'-O-methylcytidine-3'-phosphate
  modified_base 18: mod_base = OTHER; note = 2'-O-methylguanosine-3'-phosphate
  modified_base 19: mod_base = OTHER; note = 2'-O-methyluridine-3'-phosphate
  modified_base 20: mod_base = OTHER; note = 2'-O-methylguanosine-3'-phosphate
  modified_base 21: mod_base = OTHER; note = 2'-O-methylcytidine-3'-phosphorothioate
  modified_base 22: mod_base = OTHER; note = 2'-O-methyladenosine-3'-phosphorothioate
  modified_base 23: mod_base = OTHER; note = 2'-O-methylcytidine
ttgatattgacgcagtcgtgcac

SEQ ID NO: 524 - RNA, 23 nt, synthetic construct
  source 1..23: mol_type = other RNA
gtgcacgactgcgtcaatatcac

SEQ ID NO: 525 - RNA, 21 nt, synthetic construct
  source 1..21: mol_type = other RNA
  modified_base 1: mod_base = OTHER; note = 2'-O-methyluridine-3'-phosphorothioate
  modified_base 2: mod_base = OTHER; note = 2'-O-methylguanosine-3'-phosphorothioate
  modified_base 3: mod_base = OTHER; note = 2'-O-methyladenosine-3'-phosphate
  modified_base 4: mod_base = OTHER; note = 2'-O-methylguanosine-3'-phosphate
  modified_base 5: mod_base = OTHER; note = 2'-O-methyluridine-3'-phosphate
  modified_base 6: mod_base = OTHER; note = 2'-O-hexadecyl-adenosine-3'-phosphate
  modified_base 7: mod_base = OTHER; note = 2'-deoxy-2'-fluorocytidine-3'-phosphate
  modified_base 8: mod_base = OTHER; note = 2'-O-methyladenosine-3'-phosphate
  modified_base 9: mod_base = OTHER; note = 2'-deoxy-2'-fluoroguanosine-3'-phosphate
  modified_base 10: mod_base = OTHER; note = 2'-deoxy-2'-fluorocytidine-3'-phosphate
  modified_base 11: mod_base = OTHER; note = 2'-deoxy-2'-fluoroadenosine-3'-phosphate
  modified_base 12: mod_base = OTHER; note = 2'-O-methyladenosine-3'-phosphate
  modified_base 13: mod_base = OTHER; note = 2'-O-methylcytidine-3'-phosphate
  modified_base 14: mod_base = OTHER; note = 2'-O-methylcytidine-3'-phosphate
  modified_base 15: mod_base = OTHER; note = 2'-O-methyladenosine-3'-phosphate
  modified_base 16: mod_base = OTHER; note = 2'-O-methylguanosine-3'-phosphate
  modified_base 17: mod_base = OTHER; note = 2'-O-methyladenosine-3'-phosphate
  modified_base 18: mod_base = OTHER; note = 2'-O-methyladenosine-3'-phosphate
  modified_base 19: mod_base = OTHER; note = 2'-O-methylcytidine-3'-phosphorothioate
  modified_base 20: mod_base = OTHER; note = 2'-O-methyladenosine-3'-phosphorothioate
  modified_base 21: mod_base = OTHER; note = 2'-O-methyladenosine
tgagtacagcaaccagaacaa

SEQ ID NO: 526 - RNA, 23 nt, synthetic construct
  source 1..23: mol_type = other RNA
  modified_base 1: mod_base = OTHER; note = 2'-O-methyluridine-3'-phosphorothioate 5'-(E)-Vinylphosphonate
  modified_base 2: mod_base = OTHER; note = 2'-deoxy-2'-fluorouridine-3'-phosphorothioate
  modified_base 3: mod_base = OTHER; note = 2'-O-methylguanosine-3'-phosphate
  modified_base 4: mod_base = OTHER; note = 2'-O-methyluridine-3'-phosphate
  modified_base 5: mod_base = OTHER; note = 2'-O-methyluridine-3'-phosphate
  modified_base 6: mod_base = OTHER; note = 2'-deoxy-2'-fluorocytidine-3'-phosphate
  modified_base 7: mod_base = OTHER; note = 2'-O-methyluridine-3'-phosphate
  modified_base 8: mod_base = OTHER; note = 2'-deoxy-2'-fluoroguanosine-3'-phosphate
  modified_base 9: mod_base = OTHER; note = 2'-deoxy-2'-fluoroguanosine-3'-phosphate
  modified_base 10: mod_base = OTHER; note = 2'-O-methyluridine-3'-phosphate
  modified_base 11: mod_base = OTHER; note = 2'-O-methyluridine-3'-phosphate
  modified_base 12: mod_base = OTHER; note = 2'-O-methylguanosine-3'-phosphate
  modified_base 13: mod_base = OTHER; note = 2'-O-methylcytidine-3'-phosphate
  modified_base 14: mod_base = OTHER; note = 2'-deoxy-2'-fluorouridine-3'-phosphate
  modified_base 15: mod_base = OTHER; note = 2'-O-methylguanosine-3'-phosphate
  modified_base 16: mod_base = OTHER; note = 2'-deoxy-2'-fluorouridine-3'-phosphate
  modified_base 17: mod_base = OTHER; note = 2'-O-methyladenosine-3'-phosphate
  modified_base 18: mod_base = OTHER; note = 2'-O-methylcytidine-3'-phosphate
  modified_base 19: mod_base = OTHER; note = 2'-O-methyluridine-3'-phosphate
  modified_base 20: mod_base = OTHER; note = 2'-O-methylcytidine-3'-phosphate
  modified_base 21: mod_base = OTHER; note = 2'-O-methyladenosine-3'-phosphorothioate
  modified_base 22: mod_base = OTHER; note = 2'-O-methyluridine-3'-phosphorothioate
  modified_base 23: mod_base = OTHER; note = 2'-O-methylcytidine
ttgttctggttgctgtactcatc

SEQ ID NO: 527 - RNA, 23 nt, synthetic construct
  source 1..23: mol_type = other RNA
gatgagtacagcaaccagaacaa

SEQ ID NO: 528 - RNA, 21 nt, synthetic construct
  source 1..21: mol_type = other RNA
  modified_base 1: mod_base = OTHER; note = 2'-O-methyladenosine-3'-phosphorothioate
  modified_base 2: mod_base = OTHER; note = 2'-O-methyladenosine-3'-phosphorothioate
  modified_base 3: mod_base = OTHER; note = 2'-O-methylcytidine-3'-phosphate
  modified_base 4: mod_base = OTHER; note = 2'-O-methylcytidine-3'-phosphate
  modified_base 5: mod_base = OTHER; note = 2'-O-methyladenosine-3'-phosphate
  modified_base 6: mod_base = OTHER; note = 2'-O-hexadecyl-adenosine-3'-phosphate
  modified_base 7: mod_base = OTHER; note = 2'-deoxy-2'-fluoroguanosine-3'-phosphate
  modified_base 8: mod_base = OTHER; note = 2'-O-methyluridine-3'-phosphate
  modified_base 9: mod_base = OTHER; note = 2'-deoxy-2'-fluoroguanosine-3'-phosphate
  modified_base 10: mod_base = OTHER; note = 2'-deoxy-2'-fluorouridine-3'-phosphate
  modified_base 11: mod_base = OTHER; note = 2'-deoxy-2'-fluoroadenosine-3'-phosphate
  modified_base 12: mod_base = OTHER; note = 2'-O-methylcytidine-3'-phosphate
  modified_base 13: mod_base = OTHER; note = 2'-O-methyluridine-3'-phosphate
  modified_base 14: mod_base = OTHER; note = 2'-O-methyladenosine-3'-phosphate
  modified_base 15: mod_base = OTHER; note = 2'-O-methylcytidine-3'-phosphate
  modified_base 16: mod_base = OTHER; note = 2'-O-methyladenosine-3'-phosphate
  modified_base 17: mod_base = OTHER; note = 2'-O-methylguanosine-3'-phosphate
  modified_base 18: mod_base = OTHER; note = 2'-O-methylguanosine-3'-phosphate
  modified_base 19: mod_base = OTHER; note = 2'-O-methylcytidine-3'-phosphorothioate
  modified_base 20: mod_base = OTHER; note = 2'-O-methylcytidine-3'-phosphorothioate
  modified_base 21: mod_base = OTHER; note = 2'-O-methyladenosine
aaccaagtgtactacaggcca

SEQ ID NO: 529 - RNA, 23 nt, synthetic construct
  source 1..23: mol_type = other RNA
  modified_base 1: mod_base = OTHER; note = 2'-O-methyluridine-3'-phosphorothioate 5'-(E)-Vinylphosphonate
  modified_base 2: mod_base = OTHER; note = 2'-deoxy-2'-fluoroguanosine-3'-phosphorothioate
  modified_base 3: mod_base = OTHER; note = 2'-O-methylguanosine-3'-phosphate
  modified_base 4: mod_base = OTHER; note = 2'-O-methylcytidine-3'-phosphate
  modified_base 5: mod_base = OTHER; note = 2'-O-methylcytidine-3'-phosphate
  modified_base 6: mod_base = OTHER; note = 2'-deoxy-2'-fluorouridine-3'-phosphate
  modified_base 7: mod_base = OTHER; note = 2'-O-methylguanosine-3'-phosphate
  modified_base 8: mod_base = OTHER; note = 2'-deoxy-2'-fluorouridine-3'-phosphate
  modified_base 9: mod_base = OTHER; note = 2'-deoxy-2'-fluoroadenosine-3'-phosphate
  modified_base 10: mod_base = OTHER; note = 2'-O-methylguanosine-3'-phosphate
  modified_base 11: mod_base = OTHER; note = 2'-O-methyluridine-3'-phosphate
  modified_base 12: mod_base = OTHER; note = 2'-O-methyladenosine-3'-phosphate
  modified_base 13: mod_base = OTHER; note = 2'-O-methylcytidine-3'-phosphate
  modified_base 14: mod_base = OTHER; note = 2'-deoxy-2'-fluoroadenosine-3'-phosphate
  modified_base 15: mod_base = OTHER; note = 2'-O-methylcytidine-3'-phosphate
  modified_base 16: mod_base = OTHER; note = 2'-deoxy-2'-fluorouridine-3'-phosphate
  modified_base 17: mod_base = OTHER; note = 2'-O-methyluridine-3'-phosphate
  modified_base 18: mod_base = OTHER; note = 2'-O-methylguanosine-3'-phosphate
  modified_base 19: mod_base = OTHER; note = 2'-O-methylguanosine-3'-phosphate
  modified_base 20: mod_base = OTHER; note = 2'-O-methyluridine-3'-phosphate
  modified_base 21: mod_base = OTHER; note = 2'-O-methyluridine-3'-phosphorothioate
  modified_base 22: mod_base = OTHER; note = 2'-O-methylguanosine-3'-phosphorothioate
  modified_base 23: mod_base = OTHER; note = 2'-O-methylguanosine
tggcctgtagtacacttggttgg

SEQ ID NO: 530 - RNA, 23 nt, synthetic construct
  source 1..23: mol_type = other RNA
ccaaccaagtgtactacaggccc

SEQ ID NO: 531 - RNA, 21 nt, synthetic construct
  source 1..21: mol_type = other RNA
  modified_base 1: mod_base = OTHER; note = 2'-O-methylcytidine-3'-phosphorothioate
  modified_base 2: mod_base = OTHER; note = 2'-O-methyluridine-3'-phosphorothioate
  modified_base 3: mod_base = OTHER; note = 2'-O-methylguanosine-3'-phosphate
  modified_base 4: mod_base = OTHER; note = 2'-O-methyladenosine-3'-phosphate
  modified_base 5: mod_base = OTHER; note = 2'-O-methylcytidine-3'-phosphate
  modified_base 6: mod_base = OTHER; note = 2'-O-hexadecyl-uridine-3'-phosphate
  modified_base 7: mod_base = OTHER; note = 2'-deoxy-2'-fluoroguanosine-3'-phosphate
  modified_base 8: mod_base = OTHER; note = 2'-O-methyladenosine-3'-phosphate
  modified_base 9: mod_base = OTHER; note = 2'-deoxy-2'-fluoroadenosine-3'-phosphate
  modified_base 10: mod_base = OTHER; note = 2'-deoxy-2'-fluoroadenosine-3'-phosphate
  modified_base 11: mod_base = OTHER; note = 2'-deoxy-2'-fluorouridine-3'-phosphate
  modified_base 12: mod_base = OTHER; note = 2'-O-methyluridine-3'-phosphate
  modified_base 13: mod_base = OTHER; note = 2'-O-methyladenosine-3'-phosphate
  modified_base 14: mod_base = OTHER; note = 2'-O-methyladenosine-3'-phosphate
  modified_base 15: mod_base = OTHER; note = 2'-O-methyladenosine-3'-phosphate
  modified_base 16: mod_base = OTHER; note = 2'-O-methylcytidine-3'-phosphate
  modified_base 17: mod_base = OTHER; note = 2'-O-methylguanosine-3'-phosphate
  modified_base 18: mod_base = OTHER; note = 2'-O-methyladenosine-3'-phosphate
  modified_base 19: mod_base = OTHER; note = 2'-O-methylguanosine-3'-phosphorothioate
  modified_base 20: mod_base = OTHER; note = 2'-O-methylcytidine-3'-phosphorothioate
  modified_base 21: mod_base = OTHER; note = 2'-O-methyladenosine
ctgactgaaattaaacgagca

SEQ ID NO: 532 - RNA, 23 nt, synthetic construct
  source 1..23: mol_type = other RNA
  modified_base 1: mod_base = OTHER; note = 2'-O-methyluridine-3'-phosphorothioate 5'-(E)-Vinylphosphonate
  modified_base 2: mod_base = OTHER; note = 2'-deoxy-2'-fluoroguanosine-3'-phosphorothioate
  modified_base 3: mod_base = OTHER; note = 2'-O-methylcytidine-3'-phosphate
  modified_base 4: mod_base = OTHER; note = 2'-O-methyluridine-3'-phosphate
  modified_base 5: mod_base = OTHER; note = 2'-O-methylcytidine-3'-phosphate
  modified_base 6: mod_base = OTHER; note = 2'-deoxy-2'-fluoroguanosine-3'-phosphate
  modified_base 7: mod_base = OTHER; note = 2'-O-methyluridine-3'-phosphate
  modified_base 8: mod_base = OTHER; note = 2'-deoxy-2'-fluorouridine-3'-phosphate
  modified_base 9: mod_base = OTHER; note = 2'-deoxy-2'-fluorouridine-3'-phosphate
  modified_base 10: mod_base = OTHER; note = 2'-O-methyladenosine-3'-phosphate
  modified_base 11: mod_base = OTHER; note = 2'-O-methyladenosine-3'-phosphate
  modified_base 12: mod_base = OTHER; note = 2'-O-methyluridine-3'-phosphate
  modified_base 13: mod_base = OTHER; note = 2'-O-methyluridine-3'-phosphate
  modified_base 14: mod_base = OTHER; note = 2'-deoxy-2'-fluorouridine-3'-phosphate
  modified_base 15: mod_base = OTHER; note = 2'-O-methylcytidine-3'-phosphate
  modified_base 16: mod_base = OTHER; note = 2'-deoxy-2'-fluoroadenosine-3'-phosphate
  modified_base 17: mod_base = OTHER; note = 2'-O-methylguanosine-3'-phosphate
  modified_base 18: mod_base = OTHER; note = 2'-O-methyluridine-3'-phosphate
  modified_base 19: mod_base = OTHER; note = 2'-O-methylcytidine-3'-phosphate
  modified_base 20: mod_base = OTHER; note = 2'-O-methyladenosine-3'-phosphate
  modified_base 21: mod_base = OTHER; note = 2'-O-methylguanosine-3'-phosphorothioate
  modified_base 22: mod_base = OTHER; note = 2'-O-methyladenosine-3'-phosphorothioate
  modified_base 23: mod_base = OTHER; note = 2'-O-methyluridine
tgctcgtttaatttcagtcagat

SEQ ID NO: 533 - RNA, 23 nt, synthetic construct
  source 1..23: mol_type = other RNA
atctgactgaaattaaacgagcg

SEQ ID NO: 534 - RNA, 21 nt, synthetic construct
  source 1..21: mol_type = other RNA
  modified_base 1: mod_base = OTHER; note = 2'-O-methylguanosine-3'-phosphorothioate
  modified_base 2: mod_base = OTHER; note = 2'-O-methylguanosine-3'-phosphorothioate
  modified_base 3: mod_base = OTHER; note = 2'-O-methylcytidine-3'-phosphate
  modified_base 4: mod_base = OTHER; note = 2'-O-methyladenosine-3'-phosphate
  modified_base 5: mod_base = OTHER; note = 2'-O-methyladenosine-3'-phosphate
  modified_base 6: mod_base = OTHER; note = 2'-O-hexadecyl-cytidine-3'-phosphate
  modified_base 7: mod_base = OTHER; note = 2'-deoxy-2'-fluorocytidine-3'-phosphate
  modified_base 8: mod_base = OTHER; note = 2'-O-methyluridine-3'-phosphate
  modified_base 9: mod_base = OTHER; note = 2'-deoxy-2'-fluorocytidine-3'-phosphate
  modified_base 10: mod_base = OTHER; note = 2'-deoxy-2'-fluorocytidine-3'-phosphate
  modified_base 11: mod_base = OTHER; note = 2'-deoxy-2'-fluorocytidine-3'-phosphate
  modified_base 12: mod_base = OTHER; note = 2'-O-methyladenosine-3'-phosphate
  modified_base 13: mod_base = OTHER; note = 2'-O-methyluridine-3'-phosphate
  modified_base 14: mod_base = OTHER; note = 2'-O-methyluridine-3'-phosphate
  modified_base 15: mod_base = OTHER; note = 2'-O-methyluridine-3'-phosphate
  modified_base 16: mod_base = OTHER; note = 2'-O-methyluridine-3'-phosphate
  modified_base 17: mod_base = OTHER; note = 2'-O-methyladenosine-3'-phosphate
  modified_base 18: mod_base = OTHER; note = 2'-O-methylguanosine-3'-phosphate
  modified_base 19: mod_base = OTHER; note = 2'-O-methyladenosine-3'-phosphorothioate
  modified_base 20: mod_base = OTHER; note = 2'-O-methyluridine-3'-phosphorothioate
  modified_base 21: mod_base = OTHER; note = 2'-O-methyladenosine
ggcaacctcccattttagata

SEQ ID NO: 535 - RNA, 23 nt, synthetic construct
  source 1..23: mol_type = other RNA
  modified_base 1: mod_base = OTHER; note = 2'-O-methyluridine-3'-phosphorothioate 5'-(E)-Vinylphosphonate
  modified_base 2: mod_base = OTHER; note = 2'-deoxy-2'-fluoroadenosine-3'-phosphorothioate
  modified_base 3: mod_base = OTHER; note = 2'-O-methyluridine-3'-phosphate
  modified_base 4: mod_base = OTHER; note = 2'-O-methylcytidine-3'-phosphate
  modified_base 5: mod_base = OTHER; note = 2'-O-methyluridine-3'-phosphate
  modified_base 6: mod_base = OTHER; note = 2'-deoxy-2'-fluoroadenosine-3'-phosphate
  modified_base 7: mod_base = OTHER; note = 2'-O-methyladenosine-3'-phosphate
  modified_base 8: mod_base = OTHER; note = 2'-deoxy-2'-fluoroadenosine-3'-phosphate
  modified_base 9: mod_base = OTHER; note = 2'-deoxy-2'-fluoroadenosine-3'-phosphate
  modified_base 10: mod_base = OTHER; note = 2'-O-methyluridine-3'-phosphate
  modified_base 11: mod_base = OTHER; note = 2'-O-methylguanosine-3'-phosphate
  modified_base 12: mod_base = OTHER; note = 2'-O-methylguanosine-3'-phosphate
  modified_base 13: mod_base = OTHER; note = 2'-O-methylguanosine-3'-phosphate
  modified_base 14: mod_base = OTHER; note = 2'-deoxy-2'-fluoroadenosine-3'-phosphate
  modified_base 15: mod_base = OTHER; note = 2'-O-methylguanosine-3'-phosphate
  modified_base 16: mod_base = OTHER; note = 2'-deoxy-2'-fluoroguanosine-3'-phosphate
  modified_base 17: mod_base = OTHER; note = 2'-O-methyluridine-3'-phosphate
  modified_base 18: mod_base = OTHER; note = 2'-O-methyluridine-3'-phosphate
  modified_base 19: mod_base = OTHER; note = 2'-O-methylguanosine-3'-phosphate
  modified_base 20: mod_base = OTHER; note = 2'-O-methylcytidine-3'-phosphate
  modified_base 21: mod_base = OTHER; note = 2'-O-methylcytidine-3'-phosphorothioate
  modified_base 22: mod_base = OTHER; note = 2'-O-methyluridine-3'-phosphorothioate
  modified_base 23: mod_base = OTHER; note = 2'-O-methylcytidine
tatctaaaatgggaggttgcctc

SEQ ID NO: 536 - RNA, 23 nt, synthetic construct
  source 1..23: mol_type = other RNA
gaggcaacctcccattttagatg

SEQ ID NO: 537 - RNA, 21 nt, synthetic construct
  source 1..21: mol_type = other RNA
  modified_base 1: mod_base = OTHER; note = 2'-O-methylguanosine-3'-phosphorothioate
  modified_base 2: mod_base = OTHER; note = 2'-O-methyluridine-3'-phosphorothioate
  modified_base 3: mod_base = OTHER; note = 2'-O-methyladenosine-3'-phosphate
  modified_base 4: mod_base = OTHER; note = 2'-O-methylcytidine-3'-phosphate
  modified_base 5: mod_base = OTHER; note = 2'-O-methyladenosine-3'-phosphate
  modified_base 6: mod_base = OTHER; note = 2'-O-hexadecyl-guanosine-3'-phosphate
  modified_base 7: mod_base = OTHER; note = 2'-deoxy-2'-fluorocytidine-3'-phosphate
  modified_base 8: mod_base = OTHER; note = 2'-O-methyladenosine-3'-phosphate
  modified_base 9: mod_base = OTHER; note = 2'-deoxy-2'-fluoroadenosine-3'-phosphate
  modified_base 10: mod_base = OTHER; note = 2'-deoxy-2'-fluorocytidine-3'-phosphate
  modified_base 11: mod_base = OTHER; note = 2'-deoxy-2'-fluorocytidine-3'-phosphate
  modified_base 12: mod_base = OTHER; note = 2'-O-methyladenosine-3'-phosphate
  modified_base 13: mod_base = OTHER; note = 2'-O-methylguanosine-3'-phosphate
  modified_base 14: mod_base = OTHER; note = 2'-O-methyladenosine-3'-phosphate
  modified_base 15: mod_base = OTHER; note = 2'-O-methyladenosine-3'-phosphate
  modified_base 16: mod_base = OTHER; note = 2'-O-methylcytidine-3'-phosphate
  modified_base 17: mod_base = OTHER; note = 2'-O-methyladenosine-3'-phosphate
  modified_base 18: mod_base = OTHER; note = 2'-O-methyladenosine-3'-phosphate
  modified_base 19: mod_base = OTHER; note = 2'-O-methylcytidine-3'-phosphorothioate
  modified_base 20: mod_base = OTHER; note = 2'-O-methyluridine-3'-phosphorothioate
  modified_base 21: mod_base = OTHER; note = 2'-O-methyladenosine
gtacagcaaccagaacaacta

SEQ ID NO: 538 - RNA, 23 nt, synthetic construct
  source 1..23: mol_type = other RNA
  modified_base 1: mod_base = OTHER; note = 2'-O-methyluridine-3'-phosphorothioate 5'-(E)-Vinylphosphonate
  modified_base 2: mod_base = OTHER; note = 2'-deoxy-2'-fluoroadenosine-3'-phosphorothioate
  modified_base 3: mod_base = OTHER; note = 2'-O-methylguanosine-3'-phosphate
  modified_base 4: mod_base = OTHER; note = 2'-O-methyluridine-3'-phosphate
  modified_base 5: mod_base = OTHER; note = 2'-O-methyluridine-3'-phosphate
  modified_base 6: mod_base = OTHER; note = 2'-deoxy-2'-fluoroguanosine-3'-phosphate
  modified_base 7: mod_base = OTHER; note = 2'-O-methyluridine-3'-phosphate
  modified_base 8: mod_base = OTHER; note = 2'-deoxy-2'-fluorouridine-3'-phosphate
  modified_base 9: mod_base = OTHER; note = 2'-deoxy-2'-fluorocytidine-3'-phosphate
  modified_base 10: mod_base = OTHER; note = 2'-O-methyluridine-3'-phosphate
  modified_base 11: mod_base = OTHER; note = 2'-O-methylguanosine-3'-phosphate
  modified_base 12: mod_base = OTHER; note = 2'-O-methylguanosine-3'-phosphate
  modified_base 13: mod_base = OTHER; note = 2'-O-methyluridine-3'-phosphate
  modified_base 14: mod_base = OTHER; note = 2'-deoxy-2'-fluorouridine-3'-phosphate
  modified_base 15: mod_base = OTHER; note = 2'-O-methylguanosine-3'-phosphate
  modified_base 16: mod_base = OTHER; note = 2'-deoxy-2'-fluorocytidine-3'-phosphate
  modified_base 17: mod_base = OTHER; note = 2'-O-methyluridine-3'-phosphate
  modified_base 18: mod_base = OTHER; note = 2'-O-methylguanosine-3'-phosphate
  modified_base 19: mod_base = OTHER; note = 2'-O-methyluridine-3'-phosphate
  modified_base 20: mod_base = OTHER; note = 2'-O-methyladenosine-3'-phosphate
  modified_base 21: mod_base = OTHER; note = 2'-O-methylcytidine-3'-phosphorothioate
  modified_base 22: mod_base = OTHER; note = 2'-O-methyluridine-3'-phosphorothioate
  modified_base 23: mod_base = OTHER; note = 2'-O-methylcytidine
tagttgttctggttgctgtactc

SEQ ID NO: 539 - RNA, 23 nt, synthetic construct
  source 1..23: mol_type = other RNA
gagtacagcaaccagaacaactt

SEQ ID NO: 540 - RNA, 21 nt, synthetic construct
  source 1..21: mol_type = other RNA
  modified_base 1: mod_base = OTHER; note = 2'-O-methyluridine-3'-phosphorothioate
  modified_base 2: mod_base = OTHER; note = 2'-O-methylcytidine-3'-phosphorothioate
  modified_base 3: mod_base = OTHER; note = 2'-O-methyluridine-3'-phosphate
  modified_base 4: mod_base = OTHER; note = 2'-O-methylguanosine-3'-phosphate
  modified_base 5: mod_base = OTHER; note = 2'-O-methyladenosine-3'-phosphate
  modified_base 6: mod_base = OTHER; note = 2'-O-hexadecyl-cytidine-3'-phosphate
  modified_base 7: mod_base = OTHER; note = 2'-deoxy-2'-fluorouridine-3'-phosphate
  modified_base 8: mod_base = OTHER; note = 2'-O-methylguanosine-3'-phosphate
  modified_base 9: mod_base = OTHER; note = 2'-deoxy-2'-fluoroadenosine-3'-phosphate
  modified_base 10: mod_base = OTHER; note = 2'-deoxy-2'-fluoroadenosine-3'-phosphate
  modified_base 11: mod_base = OTHER; note = 2'-deoxy-2'-fluoroadenosine-3'-phosphate
  modified_base 12: mod_base = OTHER; note = 2'-O-methyluridine-3'-phosphate
  modified_base 13: mod_base = OTHER; note = 2'-O-methyluridine-3'-phosphate
  modified_base 14: mod_base = OTHER; note = 2'-O-methyladenosine-3'-phosphate
  modified_base 15: mod_base = OTHER; note = 2'-O-methyladenosine-3'-phosphate
  modified_base 16: mod_base = OTHER; note = 2'-O-methyladenosine-3'-phosphate
  modified_base 17: mod_base = OTHER; note = 2'-O-methylcytidine-3'-phosphate
  modified_base 18: mod_base = OTHER; note = 2'-O-methylguanosine-3'-phosphate
  modified_base 19: mod_base = OTHER; note = 2'-O-methyladenosine-3'-phosphorothioate
  modified_base 20: mod_base = OTHER; note = 2'-O-methylguanosine-3'-phosphorothioate
  modified_base 21: mod_base = OTHER; note = 2'-O-methyladenosine
tctgactgaaattaaacgaga

SEQ ID NO: 541 - RNA, 23 nt, synthetic construct
  source 1..23: mol_type = other RNA
  modified_base 1: mod_base = OTHER; note = 2'-O-methyluridine-3'-phosphorothioate 5'-(E)-Vinylphosphonate
  modified_base 2: mod_base = OTHER; note = 2'-deoxy-2'-fluorocytidine-3'-phosphorothioate
  modified_base 3: mod_base = OTHER; note = 2'-O-methyluridine-3'-phosphate
  modified_base 4: mod_base = OTHER; note = 2'-O-methylcytidine-3'-phosphate
  modified_base 5: mod_base = OTHER; note = 2'-O-methylguanosine-3'-phosphate
  modified_base 6: mod_base = OTHER; note = 2'-deoxy-2'-fluorouridine-3'-phosphate
  modified_base 7: mod_base = OTHER; note = 2'-O-methyluridine-3'-phosphate
  modified_base 8: mod_base = OTHER; note = 2'-deoxy-2'-fluorouridine-3'-phosphate
  modified_base 9: mod_base = OTHER; note = 2'-deoxy-2'-fluoroadenosine-3'-phosphate
  modified_base 10: mod_base = OTHER; note = 2'-O-methyladenosine-3'-phosphate
  modified_base 11: mod_base = OTHER; note = 2'-O-methyluridine-3'-phosphate
  modified_base 12: mod_base = OTHER; note = 2'-O-methyluridine-3'-phosphate
  modified_base 13: mod_base = OTHER; note = 2'-O-methyluridine-3'-phosphate
  modified_base 14: mod_base = OTHER; note = 2'-deoxy-2'-fluorocytidine-3'-phosphate
  modified_base 15: mod_base = OTHER; note = 2'-O-methyladenosine-3'-phosphate
  modified_base 16: mod_base = OTHER; note = 2'-deoxy-2'-fluoroguanosine-3'-phosphate
  modified_base 17: mod_base = OTHER; note = 2'-O-methyluridine-3'-phosphate
  modified_base 18: mod_base = OTHER; note = 2'-O-methylcytidine-3'-phosphate
  modified_base 19: mod_base = OTHER; note = 2'-O-methyladenosine-3'-phosphate
  modified_base 20: mod_base = OTHER; note = 2'-O-methylguanosine-3'-phosphate
  modified_base 21: mod_base = OTHER; note = 2'-O-methyladenosine-3'-phosphorothioate
  modified_base 22: mod_base = OTHER; note = 2'-O-methyluridine-3'-phosphorothioate
  modified_base 23: mod_base = OTHER; note = 2'-O-methyladenosine
tctcgtttaatttcagtcagata

SEQ ID NO: 542 - RNA, 23 nt, synthetic construct
  source 1..23: mol_type = other RNA
tatctgactgaaattaaacgagc

SEQ ID NO: 543 - RNA, 21 nt, synthetic construct
  source 1..21: mol_type = other RNA
  modified_base 1: mod_base = OTHER; note = 2'-O-methyladenosine-3'-phosphorothioate
  modified_base 2: mod_base = OTHER; note = 2'-O-methyladenosine-3'-phosphorothioate
  modified_base 3: mod_base = OTHER; note = 2'-O-methyladenosine-3'-phosphate
  modified_base 4: mod_base = OTHER; note = 2'-O-methylguanosine-3'-phosphate
  modified_base 5: mod_base = OTHER; note = 2'-O-methyluridine-3'-phosphate
  modified_base 6: mod_base = OTHER; note = 2'-O-hexadecyl-adenosine-3'-phosphate
  modified_base 7: mod_base = OTHER; note = 2'-deoxy-2'-fluoroadenosine-3'-phosphate
  modified_base 8: mod_base = OTHER; note = 2'-O-methyladenosine-3'-phosphate
  modified_base 9: mod_base = OTHER; note = 2'-deoxy-2'-fluorouridine-3'-phosphate
  modified_base 10: mod_base = OTHER; note = 2'-deoxy-2'-fluorouridine-3'-phosphate
  modified_base 11: mod_base = OTHER; note = 2'-deoxy-2'-fluoroguanosine-3'-phosphate
  modified_base 12: mod_base = OTHER; note = 2'-O-methylcytidine-3'-phosphate
  modified_base 13: mod_base = OTHER; note = 2'-O-methylcytidine-3'-phosphate
  modified_base 14: mod_base = OTHER; note = 2'-O-methyluridine-3'-phosphate
  modified_base 15: mod_base = OTHER; note = 2'-O-methyluridine-3'-phosphate
  modified_base 16: mod_base = OTHER; note = 2'-O-methylcytidine-3'-phosphate
  modified_base 17: mod_base = OTHER; note = 2'-O-methyluridine-3'-phosphate
  modified_base 18: mod_base = OTHER; note = 2'-O-methyladenosine-3'-phosphate
  modified_base 19: mod_base = OTHER; note = 2'-O-methylguanosine-3'-phosphorothioate
  modified_base 20: mod_base = OTHER; note = 2'-O-methyladenosine-3'-phosphorothioate
  modified_base 21: mod_base = OTHER; note = 2'-O-methyladenosine
aaagtaaattgccttctagaa

SEQ ID NO: 544 - RNA, 23 nt, synthetic construct
  source 1..23: mol_type = other RNA
  modified_base 1: mod_base = OTHER; note = 2'-O-methyluridine-3'-phosphorothioate 5'-(E)-Vinylphosphonate
  modified_base 2: mod_base = OTHER; note = 2'-deoxy-2'-fluorouridine-3'-phosphorothioate
  modified_base 3: mod_base = OTHER; note = 2'-O-methylcytidine-3'-phosphate
  modified_base 4: mod_base = OTHER; note = 2'-O-methyluridine-3'-phosphate
  modified_base 5: mod_base = OTHER; note = 2'-O-methyladenosine-3'-phosphate
  modified_base 6: mod_base = OTHER; note = 2'-deoxy-2'-fluoroguanosine-3'-phosphate
  modified_base 7: mod_base = OTHER; note = 2'-O-methyladenosine-3'-phosphate
  modified_base 8: mod_base = OTHER; note = 2'-deoxy-2'-fluoroadenosine-3'-phosphate
  modified_base 9: mod_base = OTHER; note = 2'-deoxy-2'-fluoroguanosine-3'-phosphate
  modified_base 10: mod_base = OTHER; note = 2'-O-methylguanosine-3'-phosphate
  modified_base 11: mod_base = OTHER; note = 2'-O-methylcytidine-3'-phosphate
  modified_base 12: mod_base = OTHER; note = 2'-O-methyladenosine-3'-phosphate
  modified_base 13: mod_base = OTHER; note = 2'-O-methyladenosine-3'-phosphate
  modified_base 14: mod_base = OTHER; note = 2'-deoxy-2'-fluorouridine-3'-phosphate
  modified_base 15: mod_base = OTHER; note = 2'-O-methyluridine-3'-phosphate
  modified_base 16: mod_base = OTHER; note = 2'-deoxy-2'-fluorouridine-3'-phosphate
  modified_base 17: mod_base = OTHER; note = 2'-O-methyladenosine-3'-phosphate
  modified_base 18: mod_base = OTHER; note = 2'-O-methylcytidine-3'-phosphate
  modified_base 19: mod_base = OTHER; note = 2'-O-methyluridine-3'-phosphate
  modified_base 20: mod_base = OTHER; note = 2'-O-methyluridine-3'-phosphate
  modified_base 21: mod_base = OTHER; note = 2'-O-methyluridine-3'-phosphorothioate
  modified_base 22: mod_base = OTHER; note = 2'-O-methyluridine-3'-phosphorothioate
  modified_base 23: mod_base = OTHER; note = 2'-O-methylcytidine
ttctagaaggcaatttacttttc

SEQ ID NO: 545 - RNA, 23 nt, synthetic construct
  source 1..23: mol_type = other RNA
gaaaagtaaattgccttctagac

SEQ ID NO: 546 - RNA, 21 nt, synthetic construct
  source 1..21: mol_type = other RNA
  modified_base 1: mod_base = OTHER; note = 2'-O-methylguanosine-3'-phosphorothioate
  modified_base 2: mod_base = OTHER; note = 2'-O-methyladenosine-3'-phosphorothioate
  modified_base 3: mod_base = OTHER; note = 2'-O-methylguanosine-3'-phosphate
  modified_base 4: mod_base = OTHER; note = 2'-O-methyladenosine-3'-phosphate
  modified_base 5: mod_base = OTHER; note = 2'-O-methyluridine-3'-phosphate
  modified_base 6: mod_base = OTHER; note = 2'-O-hexadecyl-uridine-3'-phosphate
  modified_base 7: mod_base = OTHER; note = 2'-deoxy-2'-fluorouridine-3'-phosphate
  modified_base 8: mod_base = OTHER; note = 2'-O-methylcytidine-3'-phosphate
  modified_base 9: mod_base = OTHER; note = 2'-deoxy-2'-fluoroadenosine-3'-phosphate
  modified_base 10: mod_base = OTHER; note = 2'-deoxy-2'-fluorouridine-3'-phosphate
  modified_base 11: mod_base = OTHER; note = 2'-deoxy-2'-fluoroadenosine-3'-phosphate
  modified_base 12: mod_base = OTHER; note = 2'-O-methylguanosine-3'-phosphate
  modified_base 13: mod_base = OTHER; note = 2'-O-methylcytidine-3'-phosphate
  modified_base 14: mod_base = OTHER; note = 2'-O-methyluridine-3'-phosphate
  modified_base 15: mod_base = OTHER; note = 2'-O-methyladenosine-3'-phosphate
  modified_base 16: mod_base = OTHER; note = 2'-O-methyluridine-3'-phosphate
  modified_base 17: mod_base = OTHER; note = 2'-O-methyluridine-3'-phosphate
  modified_base 18: mod_base = OTHER; note = 2'-O-methyluridine-3'-phosphate
  modified_base 19: mod_base = OTHER; note = 2'-O-methyladenosine-3'-phosphorothioate
  modified_base 20: mod_base = OTHER; note = 2'-O-methylguanosine-3'-phosphorothioate
  modified_base 21: mod_base = OTHER; note = 2'-O-methyladenosine
gagatttcatagctatttaga

SEQ ID NO: 547 - RNA, 23 nt, synthetic construct
  source 1..23: mol_type = other RNA
  modified_base 1: mod_base = OTHER; note = 2'-O-methyluridine-3'-phosphorothioate 5'-(E)-Vinylphosphonate
  modified_base 2: mod_base = OTHER; note = 2'-deoxy-2'-fluorocytidine-3'-phosphorothioate
  modified_base 3: mod_base = OTHER; note = 2'-O-methyluridine-3'-phosphate
  modified_base 4: mod_base = OTHER; note = 2'-O-methyladenosine-3'-phosphate
  modified_base 5: mod_base = OTHER; note = 2'-O-methyladenosine-3'-phosphate
  modified_base 6: mod_base = OTHER; note = 2'-deoxy-2'-fluoroadenosine-3'-phosphate
  modified_base 7: mod_base = OTHER; note = 2'-O-methyluridine-3'-phosphate
  modified_base 8: mod_base = OTHER; note = 2'-deoxy-2'-fluoroadenosine-3'-phosphate
  modified_base 9: mod_base = OTHER; note = 2'-deoxy-2'-fluoroguanosine-3'-phosphate
  modified_base 10: mod_base = OTHER; note = 2'-O-methylcytidine-3'-phosphate
  modified_base 11: mod_base = OTHER; note = 2'-O-methyluridine-3'-phosphate
  modified_base 12: mod_base = OTHER; note = 2'-O-methyladenosine-3'-phosphate
  modified_base 13: mod_base = OTHER; note = 2'-O-methyluridine-3'-phosphate
  modified_base 14: mod_base = OTHER; note = 2'-deoxy-2'-fluoroguanosine-3'-phosphate
  modified_base 15: mod_base = OTHER; note = 2'-O-methyladenosine-3'-phosphate
  modified_base 16: mod_base = OTHER; note = 2'-deoxy-2'-fluoroadenosine-3'-phosphate
  modified_base 17: mod_base = OTHER; note = 2'-O-methyladenosine-3'-phosphate
  modified_base 18: mod_base = OTHER; note = 2'-O-methyluridine-3'-phosphate
  modified_base 19: mod_base = OTHER; note = 2'-O-methylcytidine-3'-phosphate
  modified_base 20: mod_base = OTHER; note = 2'-O-methyluridine-3'-phosphate
  modified_base 21: mod_base = OTHER; note = 2'-O-methylcytidine-3'-phosphorothioate
  modified_base 22: mod_base = OTHER; note = 2'-O-methyluridine-3'-phosphorothioate
  modified_base 23: mod_base = OTHER; note = 2'-O-methyladenosine
tctaaatagctatgaaatctcta

SEQ ID NO: 548 - RNA, 23 nt, synthetic construct
  source 1..23: mol_type = other RNA
tagagatttcatagctatttaga

SEQ ID NO: 549 - RNA, 21 nt, synthetic construct
  source 1..21: mol_type = other RNA
  modified_base 1: mod_base = OTHER; note = 2'-O-methyladenosine-3'-phosphorothioate
  modified_base 2: mod_base = OTHER; note = 2'-O-methyladenosine-3'-phosphorothioate
  modified_base 3: mod_base = OTHER; note = 2'-O-methylcytidine-3'-phosphate
  modified_base 4: mod_base = OTHER; note = 2'-O-methylcytidine-3'-phosphate
  modified_base 5: mod_base = OTHER; note = 2'-O-methyladenosine-3'-phosphate
  modified_base 6: mod_base = OTHER; note = 2'-O-hexadecyl-guanosine-3'-phosphate
  modified_base 7: mod_base = OTHER; note = 2'-deoxy-2'-fluoroadenosine-3'-phosphate
  modified_base 8: mod_base = OTHER; note = 2'-O-methyladenosine-3'-phosphate
  modified_base 9: mod_base = OTHER; note = 2'-deoxy-2'-fluorocytidine-3'-phosphate
  modified_base 10: mod_base = OTHER; note = 2'-deoxy-2'-fluoroadenosine-3'-phosphate
  modified_base 11: mod_base = OTHER; note = 2'-deoxy-2'-fluoroadenosine-3'-phosphate
  modified_base 12: mod_base = OTHER; note = 2'-O-methylcytidine-3'-phosphate
  modified_base 13: mod_base = OTHER; note = 2'-O-methyluridine-3'-phosphate
  modified_base 14: mod_base = OTHER; note = 2'-O-methyluridine-3'-phosphate
  modified_base 15: mod_base = OTHER; note = 2'-O-methyluridine-3'-phosphate
  modified_base 16: mod_base = OTHER; note = 2'-O-methylguanosine-3'-phosphate
  modified_base 17: mod_base = OTHER; note = 2'-O-methyluridine-3'-phosphate
  modified_base 18: mod_base = OTHER; note = 2'-O-methylguanosine-3'-phosphate
  modified_base 19: mod_base = OTHER; note = 2'-O-methylcytidine-3'-phosphorothioate
  modified_base 20: mod_base = OTHER; note = 2'-O-methyladenosine-3'-phosphorothioate
  modified_base 21: mod_base = OTHER; note = 2'-O-methyladenosine
aaccagaacaactttgtgcaa

SEQ ID NO: 550 - RNA, 23 nt, synthetic construct
  source 1..23: mol_type = other RNA
  modified_base 1: mod_base = OTHER; note = 2'-O-methyluridine-3'-phosphorothioate 5'-(E)-Vinylphosphonate
  modified_base 2: mod_base = OTHER; note = 2'-deoxy-2'-fluorouridine-3'-phosphorothioate
  modified_base 3: mod_base = OTHER; note = 2'-O-methylguanosine-3'-phosphate
  modified_base 4: mod_base = OTHER; note = 2'-O-methylcytidine-3'-phosphate
  modified_base 5: mod_base = OTHER; note = 2'-O-methyladenosine-3'-phosphate
  modified_base 6: mod_base = OTHER; note = 2'-deoxy-2'-fluorocytidine-3'-phosphate
  modified_base 7: mod_base = OTHER; note = 2'-O-methyladenosine-3'-phosphate
  modified_base 8: mod_base = OTHER; note = 2'-deoxy-2'-fluoroadenosine-3'-phosphate
  modified_base 9: mod_base = OTHER; note = 2'-deoxy-2'-fluoroadenosine-3'-phosphate
  modified_base 10: mod_base = OTHER; note = 2'-O-methylguanosine-3'-phosphate
  modified_base 11: mod_base = OTHER; note = 2'-O-methyluridine-3'-phosphate
  modified_base 12: mod_base = OTHER; note = 2'-O-methyluridine-3'-phosphate
  modified_base 13: mod_base = OTHER; note = 2'-O-methylguanosine-3'-phosphate
  modified_base 14: mod_base = OTHER; note = 2'-deoxy-2'-fluorouridine-3'-phosphate
  modified_base 15: mod_base = OTHER; note = 2'-O-methyluridine-3'-phosphate
  modified_base 16: mod_base = OTHER; note = 2'-deoxy-2'-fluorocytidine-3'-phosphate
  modified_base 17: mod_base = OTHER; note = 2'-O-methyluridine-3'-phosphate
  modified_base 18: mod_base = OTHER; note = 2'-O-methylguanosine-3'-phosphate
  modified_base 19: mod_base = OTHER; note = 2'-O-methylguanosine-3'-phosphate
  modified_base 20: mod_base = OTHER; note = 2'-O-methyluridine-3'-phosphate
  modified_base 21: mod_base = OTHER; note = 2'-O-methyluridine-3'-phosphorothioate
  modified_base 22: mod_base = OTHER; note = 2'-O-methylguanosine-3'-phosphorothioate
  modified_base 23: mod_base = OTHER; note = 2'-O-methylcytidine
ttgcacaaagttgttctggttgc

SEQ ID NO: 551 - RNA, 23 nt, synthetic construct
  source 1..23: mol_type = other RNA
gcaaccagaacaactttgtgcac

SEQ ID NO: 552 - RNA, 21 nt, synthetic construct
  source 1..21: mol_type = other RNA
  modified_base 1: mod_base = OTHER; note = 2'-O-methyluridine-3'-phosphorothioate
  modified_base 2: mod_base = OTHER; note = 2'-O-methylguanosine-3'-phosphorothioate
  modified_base 3: mod_base = OTHER; note = 2'-O-methyladenosine-3'-phosphate
  modified_base 4: mod_base = OTHER; note = 2'-O-methylcytidine-3'-phosphate
  modified_base 5: mod_base = OTHER; note = 2'-O-methyluridine-3'-phosphate
  modified_base 6: mod_base = OTHER; note = 2'-O-hexadecyl-guanosine-3'-phosphate
  modified_base 7: mod_base = OTHER; note = 2'-deoxy-2'-fluoroadenosine-3'-phosphate
  modified_base 8: mod_base = OTHER; note = 2'-O-methyladenosine-3'-phosphate
  modified_base 9: mod_base = OTHER; note = 2'-deoxy-2'-fluoroadenosine-3'-phosphate
  modified_base 10: mod_base = OTHER; note = 2'-deoxy-2'-fluorouridine-3'-phosphate
  modified_base 11: mod_base = OTHER; note = 2'-deoxy-2'-fluorouridine-3'-phosphate
  modified_base 12: mod_base = OTHER; note = 2'-O-methyladenosine-3'-phosphate
  modified_base 13: mod_base = OTHER; note = 2'-O-methyladenosine-3'-phosphate
  modified_base 14: mod_base = OTHER; note = 2'-O-methyladenosine-3'-phosphate
  modified_base 15: mod_base = OTHER; note = 2'-O-methylcytidine-3'-phosphate
  modified_base 16: mod_base = OTHER; note = 2'-O-methylguanosine-3'-phosphate
  modified_base 17: mod_base = OTHER; note = 2'-O-methyladenosine-3'-phosphate
  modified_base 18: mod_base = OTHER; note = 2'-O-methylguanosine-3'-phosphate
  modified_base 19: mod_base = OTHER; note = 2'-O-methylcytidine-3'-phosphorothioate
  modified_base 20: mod_base = OTHER; note = 2'-O-methylguanosine-3'-phosphorothioate
  modified_base 21: mod_base = OTHER; note = 2'-O-methyladenosine
tgactgaaattaaacgagcga

SEQ ID NO: 553 - RNA, 23 nt, synthetic construct
  source 1..23: mol_type = other RNA
  modified_base 1: mod_base = OTHER; note = 2'-O-methyluridine-3'-phosphorothioate 5'-(E)-Vinylphosphonate
  modified_base 2: mod_base = OTHER; note = 2'-deoxy-2'-fluorocytidine-3'-phosphorothioate
  modified_base 3: mod_base = OTHER; note = 2'-O-methylguanosine-3'-phosphate
  modified_base 4: mod_base = OTHER; note = 2'-O-methylcytidine-3'-phosphate
  modified_base 5: mod_base = OTHER; note = 2'-O-methyluridine-3'-phosphate
  modified_base 6: mod_base = OTHER; note = 2'-deoxy-2'-fluorocytidine-3'-phosphate
  modified_base 7: mod_base = OTHER; note = 2'-O-methylguanosine-3'-phosphate
  modified_base 8: mod_base = OTHER; note = 2'-deoxy-2'-fluorouridine-3'-phosphate
  modified_base 9: mod_base = OTHER; note = 2'-deoxy-2'-fluorouridine-3'-phosphate
  modified_base 10: mod_base = OTHER; note = 2'-O-methyluridine-3'-phosphate
  modified_base 11: mod_base = OTHER; note = 2'-O-methyladenosine-3'-phosphate
  modified_base 12: mod_base = OTHER; note = 2'-O-methyladenosine-3'-phosphate
  modified_base 13: mod_base = OTHER; note = 2'-O-methyluridine-3'-phosphate
  modified_base 14: mod_base = OTHER; note = 2'-deoxy-2'-fluorouridine-3'-phosphate
  modified_base 15: mod_base = OTHER; note = 2'-O-methyluridine-3'-phosphate
  modified_base 16: mod_base = OTHER; note = 2'-deoxy-2'-fluorocytidine-3'-phosphate
  modified_base 17: mod_base = OTHER; note = 2'-O-methyladenosine-3'-phosphate
  modified_base 18: mod_base = OTHER; note = 2'-O-methylguanosine-3'-phosphate
  modified_base 19: mod_base = OTHER; note = 2'-O-methyluridine-3'-phosphate
  modified_base 20: mod_base = OTHER; note = 2'-O-methylcytidine-3'-phosphate
  modified_base 21: mod_base = OTHER; note = 2'-O-methyladenosine-3'-phosphorothioate
  modified_base 22: mod_base = OTHER; note = 2'-O-methylguanosine-3'-phosphorothioate
  modified_base 23: mod_base = OTHER; note = 2'-O-methyladenosine
tcgctcgtttaatttcagtcaga

SEQ ID NO: 554 - RNA, 23 nt, synthetic construct
  source 1..23: mol_type = other RNA
tctgactgaaattaaacgagcga

SEQ ID NO: 555 - RNA, 21 nt, synthetic construct
  source 1..21: mol_type = other RNA
  modified_base 1: mod_base = OTHER; note = 2'-O-methylcytidine-3'-phosphorothioate
  modified_base 2: mod_base = OTHER; note = 2'-O-methyladenosine-3'-phosphorothioate
  modified_base 3: mod_base = OTHER; note = 2'-O-methyluridine-3'-phosphate
  modified_base 4: mod_base = OTHER; note = 2'-O-methylguanosine-3'-phosphate
  modified_base 5: mod_base = OTHER; note = 2'-O-methyladenosine-3'-phosphate
  modified_base 6: mod_base = OTHER; note = 2'-O-hexadecyl-guanosine-3'-phosphate
  modified_base 7: mod_base = OTHER; note = 2'-deoxy-2'-fluorocytidine-3'-phosphate
  modified_base 8: mod_base = OTHER; note = 2'-O-methyluridine-3'-phosphate
  modified_base 9: mod_base = OTHER; note = 2'-deoxy-2'-fluorocytidine-3'-phosphate
  modified_base 10: mod_base = OTHER; note = 2'-deoxy-2'-fluorouridine-3'-phosphate
  modified_base 11: mod_base = OTHER; note = 2'-deoxy-2'-fluoroguanosine-3'-phosphate
  modified_base 12: mod_base = OTHER; note = 2'-O-methyluridine-3'-phosphate
  modified_base 13: mod_base = OTHER; note = 2'-O-methylguanosine-3'-phosphate
  modified_base 14: mod_base = OTHER; note = 2'-O-methyluridine-3'-phosphate
  modified_base 15: mod_base = OTHER; note = 2'-O-methylguanosine-3'-phosphate
  modified_base 16: mod_base = OTHER; note = 2'-O-methyluridine-3'-phosphate
  modified_base 17: mod_base = OTHER; note = 2'-O-methyladenosine-3'-phosphate
  modified_base 18: mod_base = OTHER; note = 2'-O-methylcytidine-3'-phosphate
  modified_base 19: mod_base = OTHER; note = 2'-O-methylcytidine-3'-phosphorothioate
  modified_base 20: mod_base = OTHER; note = 2'-O-methylguanosine-3'-phosphorothioate
  modified_base 21: mod_base = OTHER; note = 2'-O-methyladenosine
catgagctctgtgtgtaccga

SEQ ID NO: 556 - RNA, 23 nt, synthetic construct
  source 1..23: mol_type = other RNA
  modified_base 1: mod_base = OTHER; note = 2'-O-methyluridine-3'-phosphorothioate 5'-(E)-Vinylphosphonate
  modified_base 2: mod_base = OTHER; note = 2'-deoxy-2'-fluorocytidine-3'-phosphorothioate
  modified_base 3: mod_base = OTHER; note = 2'-O-methylguanosine-3'-phosphate
  modified_base 4: mod_base = OTHER; note = 2'-O-methylguanosine-3'-phosphate
  modified_base 5: mod_base = OTHER; note = 2'-O-methyluridine-3'-phosphate
  modified_base 6: mod_base = OTHER; note = 2'-deoxy-2'-fluoroadenosine-3'-phosphate
  modified_base 7: mod_base = OTHER; note = 2'-O-methylcytidine-3'-phosphate
  modified_base 8: mod_base = OTHER; note = 2'-deoxy-2'-fluoroadenosine-3'-phosphate
  modified_base 9: mod_base = OTHER; note = 2'-deoxy-2'-fluorocytidine-3'-phosphate
  modified_base 10: mod_base = OTHER; note = 2'-O-methyladenosine-3'-phosphate
  modified_base 11: mod_base = OTHER; note = 2'-O-methylcytidine-3'-phosphate
  modified_base 12: mod_base = OTHER; note = 2'-O-methyladenosine-3'-phosphate
  modified_base 13: mod_base = OTHER; note = 2'-O-methylguanosine-3'-phosphate
  modified_base 14: mod_base = OTHER; note = 2'-deoxy-2'-fluoroadenosine-3'-phosphate
  modified_base 15: mod_base = OTHER; note = 2'-O-methylguanosine-3'-phosphate
  modified_base 16: mod_base = OTHER; note = 2'-deoxy-2'-fluorocytidine-3'-phosphate
  modified_base 17: mod_base = OTHER; note = 2'-O-methyluridine-3'-phosphate
  modified_base 18: mod_base = OTHER; note = 2'-O-methylcytidine-3'-phosphate
  modified_base 19: mod_base = OTHER; note = 2'-O-methyladenosine-3'-phosphate
  modified_base 20: mod_base = OTHER; note = 2'-O-methyluridine-3'-phosphate
  modified_base 21: mod_base = OTHER; note = 2'-O-methylguanosine-3'-phosphorothioate
  modified_base 22: mod_base = OTHER; note = 2'-O-methylcytidine-3'-phosphorothioate
  modified_base 23: mod_base = OTHER; note = 2'-O-methyluridine
tcggtacacacagagctcatgct

SEQ ID NO: 557 - RNA, 23 nt, synthetic construct
  source 1..23: mol_type = other RNA
agcatgagctctgtgtgtaccga

SEQ ID NO: 558 - RNA, 21 nt, synthetic construct
  source 1..21: mol_type = other RNA
  modified_base 1: mod_base = OTHER; note = 2'-O-methyluridine-3'-phosphorothioate
  modified_base 2: mod_base = OTHER; note = 2'-O-methyladenosine-3'-phosphorothioate
  modified_base 3: mod_base = OTHER; note = 2'-O-methylcytidine-3'-phosphate
  modified_base 4: mod_base = OTHER; note = 2'-O-methyladenosine-3'-phosphate
  modified_base 5: mod_base = OTHER; note = 2'-O-methylguanosine-3'-phosphate
  modified_base 6: mod_base = OTHER; note = 2'-O-hexadecyl-cytidine-3'-phosphate
  modified_base 7: mod_base = OTHER; note = 2'-deoxy-2'-fluoroadenosine-3'-phosphate
  modified_base 8: mod_base = OTHER; note = 2'-O-methyladenosine-3'-phosphate
  modified_base 9: mod_base = OTHER; note = 2'-deoxy-2'-fluorocytidine-3'-phosphate
  modified_base 10: mod_base = OTHER; note = 2'-deoxy-2'-fluorocytidine-3'-phosphate
  modified_base 11: mod_base = OTHER; note = 2'-deoxy-2'-fluoroadenosine-3'-phosphate
  modified_base 12: mod_base = OTHER; note = 2'-O-methylguanosine-3'-phosphate
  modified_base 13: mod_base = OTHER; note = 2'-O-methyladenosine-3'-phosphate
  modified_base 14: mod_base = OTHER; note = 2'-O-methyladenosine-3'-phosphate
  modified_base 15: mod_base = OTHER; note = 2'-O-methylcytidine-3'-phosphate
  modified_base 16: mod_base = OTHER; note = 2'-O-methyladenosine-3'-phosphate
  modified_base 17: mod_base = OTHER; note = 2'-O-methyladenosine-3'-phosphate
  modified_base 18: mod_base = OTHER; note = 2'-O-methylcytidine-3'-phosphate
  modified_base 19: mod_base = OTHER; note = 2'-O-methyluridine-3'-phosphorothioate
  modified_base 20: mod_base = OTHER; note = 2'-O-methyluridine-3'-phosphorothioate
  modified_base 21: mod_base = OTHER; note = 2'-O-methyladenosine
tacagcaaccagaacaactta

SEQ ID NO: 559 - RNA, 23 nt, synthetic construct
  source 1..23: mol_type = other RNA
  modified_base 1: mod_base = OTHER; note = 2'-O-methyluridine-3'-phosphorothioate 5'-(E)-Vinylphosphonate
  modified_base 2: mod_base = OTHER; note = 2'-deoxy-2'-fluoroadenosine-3'-phosphorothioate
  modified_base 3: mod_base = OTHER; note = 2'-O-methyladenosine-3'-phosphate
  modified_base 4: mod_base = OTHER; note = 2'-O-methylguanosine-3'-phosphate
  modified_base 5: mod_base = OTHER; note = 2'-O-methyluridine-3'-phosphate
  modified_base 6: mod_base = OTHER; note = 2'-deoxy-2'-fluorouridine-3'-phosphate
  modified_base 7: mod_base = OTHER; note = 2'-O-methylguanosine-3'-phosphate
  modified_base 8: mod_base = OTHER; note = 2'-deoxy-2'-fluorouridine-3'-phosphate
  modified_base 9: mod_base = OTHER; note = 2'-deoxy-2'-fluorouridine-3'-phosphate
  modified_base 10: mod_base = OTHER; note = 2'-O-methylcytidine-3'-phosphate
  modified_base 11: mod_base = OTHER; note = 2'-O-methyluridine-3'-phosphate
  modified_base 12: mod_base = OTHER; note = 2'-O-methylguanosine-3'-phosphate
  modified_base 13: mod_base = OTHER; note = 2'-O-methylguanosine-3'-phosphate
  modified_base 14: mod_base = OTHER; note = 2'-deoxy-2'-fluorouridine-3'-phosphate
  modified_base 15: mod_base = OTHER; note = 2'-O-methyluridine-3'-phosphate
  modified_base 16: mod_base = OTHER; note = 2'-deoxy-2'-fluoroguanosine-3'-phosphate
  modified_base 17: mod_base = OTHER; note = 2'-O-methylcytidine-3'-phosphate
  modified_base 18: mod_base = OTHER; note = 2'-O-methyluridine-3'-phosphate
  modified_base 19: mod_base = OTHER; note = 2'-O-methylguanosine-3'-phosphate
  modified_base 20: mod_base = OTHER; note = 2'-O-methyluridine-3'-phosphate
  modified_base 21: mod_base = OTHER; note = 2'-O-methyladenosine-3'-phosphorothioate
  modified_base 22: mod_base = OTHER; note = 2'-O-methylcytidine-3'-phosphorothioate
  modified_base 23: mod_base = OTHER; note = 2'-O-methyluridine
taagttgttctggttgctgtact

SEQ ID NO: 560 - RNA, 23 nt, synthetic construct
  source 1..23: mol_type = other RNA
agtacagcaaccagaacaacttt

SEQ ID NO: 561 - RNA, 21 nt, synthetic construct
  source 1..21: mol_type = other RNA
  modified_base 1: mod_base = OTHER; note = 2'-O-methyladenosine-3'-phosphorothioate
  modified_base 2: mod_base = OTHER; note = 2'-O-methyladenosine-3'-phosphorothioate
  modified_base 3: mod_base = OTHER; note = 2'-O-methyluridine-3'-phosphate
  modified_base 4: mod_base = OTHER; note = 2'-O-methylcytidine-3'-phosphate
  modified_base 5: mod_base = OTHER; note = 2'-O-methyluridine-3'-phosphate
  modified_base 6: mod_base = OTHER; note = 2'-O-hexadecyl-uridine-3'-phosphate
  modified_base 7: mod_base = OTHER; note = 2'-deoxy-2'-fluorouridine-3'-phosphate
  modified_base 8: mod_base = OTHER; note = 2'-O-methyluridine-3'-phosphate
  modified_base 9: mod_base = OTHER; note = 2'-deoxy-2'-fluorouridine-3'-phosphate
  modified_base 10: mod_base = OTHER; note = 2'-deoxy-2'-fluorocytidine-3'-phosphate
  modified_base 11: mod_base = OTHER; note = 2'-deoxy-2'-fluorocytidine-3'-phosphate
  modified_base 12: mod_base = OTHER; note = 2'-O-methyladenosine-3'-phosphate
  modified_base 13: mod_base = OTHER; note = 2'-O-methylguanosine-3'-phosphate
  modified_base 14: mod_base = OTHER; note = 2'-O-methylcytidine-3'-phosphate
  modified_base 15: mod_base = OTHER; note = 2'-O-methyluridine-3'-phosphate
  modified_base 16: mod_base = OTHER; note = 2'-O-methyluridine-3'-phosphate
  modified_base 17: mod_base = OTHER; note = 2'-O-methylguanosine-3'-phosphate
  modified_base 18: mod_base = OTHER; note = 2'-O-methyladenosine-3'-phosphate
  modified_base 19: mod_base = OTHER; note = 2'-O-methylguanosine-3'-phosphorothioate
  modified_base 20: mod_base = OTHER; note = 2'-O-methylguanosine-3'-phosphorothioate
  modified_base 21: mod_base = OTHER; note = 2'-O-methyladenosine
aatctttttccagcttgagga

SEQ ID NO: 562 - RNA, 23 nt, synthetic construct
  source 1..23: mol_type = other RNA
  modified_base 1: mod_base = OTHER; note = 2'-O-methyluridine-3'-phosphorothioate 5'-(E)-Vinylphosphonate
  modified_base 2: mod_base = OTHER; note = 2'-deoxy-2'-fluorocytidine-3'-phosphorothioate
  modified_base 3: mod_base = OTHER; note = 2'-O-methylcytidine-3'-phosphate
  modified_base 4: mod_base = OTHER; note = 2'-O-methyluridine-3'-phosphate
  modified_base 5: mod_base = OTHER; note = 2'-O-methylcytidine-3'-phosphate
  modified_base 6: mod_base = OTHER; note = 2'-deoxy-2'-fluoroadenosine-3'-phosphate
  modified_base 7: mod_base = OTHER; note = 2'-O-methyladenosine-3'-phosphate
  modified_base 8: mod_base = OTHER; note = 2'-deoxy-2'-fluoroguanosine-3'-phosphate
  modified_base 9: mod_base = OTHER; note = 2'-deoxy-2'-fluorocytidine-3'-phosphate
  modified_base 10: mod_base = OTHER; note = 2'-O-methyluridine-3'-phosphate
  modified_base 11: mod_base = OTHER; note = 2'-O-methylguanosine-3'-phosphate
  modified_base 12: mod_base = OTHER; note = 2'-O-methylguanosine-3'-phosphate
  modified_base 13: mod_base = OTHER; note = 2'-O-methyladenosine-3'-phosphate
  modified_base 14: mod_base = OTHER; note = 2'-deoxy-2'-fluoroadenosine-3'-phosphate
  modified_base 15: mod_base = OTHER; note = 2'-O-methyladenosine-3'-phosphate
  modified_base 16: mod_base = OTHER; note = 2'-deoxy-2'-fluoroadenosine-3'-phosphate
  modified_base 17: mod_base = OTHER; note = 2'-O-methyladenosine-3'-phosphate
  modified_base 18: mod_base = OTHER; note = 2'-O-methylguanosine-3'-phosphate
  modified_base 19: mod_base = OTHER; note = 2'-O-methyladenosine-3'-phosphate
  modified_base 20: mod_base = OTHER; note = 2'-O-methyluridine-3'-phosphate
  modified_base 21: mod_base = OTHER; note = 2'-O-methyluridine-3'-phosphorothioate
  modified_base 22: mod_base = OTHER; note = 2'-O-methyladenosine-3'-phosphorothioate
  modified_base 23: mod_base = OTHER; note = 2'-O-methylguanosine
tcctcaagctggaaaaagattag

SEQ ID NO: 563 - RNA, 23 nt, synthetic construct
  source 1..23: mol_type = other RNA
ctaatctttttccagcttgaggg

SEQ ID NO: 564 - RNA, 21 nt, synthetic construct
  source 1..21: mol_type = other RNA
  modified_base 1: mod_base = OTHER; note = 2'-O-methylcytidine-3'-phosphorothioate
  modified_base 2: mod_base = OTHER; note = 2'-O-methyluridine-3'-phosphorothioate
  modified_base 3: mod_base = OTHER; note = 2'-O-methylguanosine-3'-phosphate
  modified_base 4: mod_base = OTHER; note = 2'-O-methylcytidine-3'-phosphate
  modified_base 5: mod_base = OTHER; note = 2'-O-methylcytidine-3'-phosphate
  modified_base 6: mod_base = OTHER; note = 2'-O-hexadecyl-adenosine-3'-phosphate
  modified_base 7: mod_base = OTHER; note = 2'-deoxy-2'-fluoroguanosine-3'-phosphate
  modified_base 8: mod_base = OTHER; note = 2'-O-methylguanosine-3'-phosphate
  modified_base 9: mod_base = OTHER; note = 2'-deoxy-2'-fluorouridine-3'-phosphate
  modified_base 10: mod_base = OTHER; note = 2'-deoxy-2'-fluorouridine-3'-phosphate
  modified_base 11: mod_base = OTHER; note = 2'-deoxy-2'-fluorouridine-3'-phosphate
  modified_base 12: mod_base = OTHER; note = 2'-O-methylguanosine-3'-phosphate
  modified_base 13: mod_base = OTHER; note = 2'-O-methyluridine-3'-phosphate
  modified_base 14: mod_base = OTHER; note = 2'-O-methyluridine-3'-phosphate
  modified_base 15: mod_base = OTHER; note = 2'-O-methyladenosine-3'-phosphate
  modified_base 16: mod_base = OTHER; note = 2'-O-methylguanosine-3'-phosphate
  modified_base 17: mod_base = OTHER; note = 2'-O-methylguanosine-3'-phosphate
  modified_base 18: mod_base = OTHER; note = 2'-O-methyladenosine-3'-phosphate
  modified_base 19: mod_base = OTHER; note = 2'-O-methylguanosine-3'-phosphorothioate
  modified_base 20: mod_base = OTHER; note = 2'-O-methylguanosine-3'-phosphorothioate
  modified_base 21: mod_base = OTHER; note = 2'-O-methyladenosine
ctgccaggtttgttaggagga

SEQ ID NO: 565 - RNA, 23 nt, synthetic construct
  source 1..23: mol_type = other RNA
  modified_base 1: mod_base = OTHER; note = 2'-O-methyluridine-3'-phosphorothioate 5'-(E)-Vinylphosphonate
  modified_base 2: mod_base = OTHER; note = 2'-deoxy-2'-fluorocytidine-3'-phosphorothioate
  modified_base 3: mod_base = OTHER; note = 2'-O-methylcytidine-3'-phosphate
  modified_base 4: mod_base = OTHER; note = 2'-O-methyluridine-3'-phosphate
  modified_base 5: mod_base = OTHER; note = 2'-O-methylcytidine-3'-phosphate
  modified_base 6: mod_base = OTHER; note = 2'-deoxy-2'-fluorocytidine-3'-phosphate
  modified_base 7: mod_base = OTHER; note = 2'-O-methyluridine-3'-phosphate
  modified_base 8: mod_base = OTHER; note = 2'-deoxy-2'-fluoroadenosine-3'-phosphate
  modified_base 9: mod_base = OTHER; note = 2'-deoxy-2'-fluoroadenosine-3'-phosphate
  modified_base 10: mod_base = OTHER; note = 2'-O-methylcytidine-3'-phosphate
  modified_base 11: mod_base = OTHER; note = 2'-O-methyladenosine-3'-phosphate
  modified_base 12: mod_base = OTHER; note = 2'-O-methyladenosine-3'-phosphate
  modified_base 13: mod_base = OTHER; note = 2'-O-methyladenosine-3'-phosphate
  modified_base 14: mod_base = OTHER; note = 2'-deoxy-2'-fluorocytidine-3'-phosphate
  modified_base 15: mod_base = OTHER; note = 2'-O-methylcytidine-3'-phosphate
  modified_base 16: mod_base = OTHER; note = 2'-deoxy-2'-fluorouridine-3'-phosphate
  modified_base 17: mod_base = OTHER; note = 2'-O-methylguanosine-3'-phosphate
  modified_base 18: mod_base = OTHER; note = 2'-O-methylguanosine-3'-phosphate
  modified_base 19: mod_base = OTHER; note = 2'-O-methylcytidine-3'-phosphate
  modified_base 20: mod_base = OTHER; note = 2'-O-methyladenosine-3'-phosphate
  modified_base 21: mod_base = OTHER; note = 2'-O-methylguanosine-3'-phosphorothioate
  modified_base 22: mod_base = OTHER; note = 2'-O-methyladenosine-3'-phosphorothioate
  modified_base 23: mod_base = OTHER; note = 2'-O-methyladenosine
tcctcctaacaaacctggcagaa

SEQ ID NO: 566 - RNA, 23 nt, synthetic construct
  source 1..23: mol_type = other RNA
ttctgccaggtttgttaggaggc

SEQ ID NO: 567 - RNA, 21 nt, synthetic construct
  source 1..21: mol_type = other RNA
  modified_base 1: mod_base = OTHER; note = 2'-O-methylcytidine-3'-phosphorothioate
  modified_base 2: mod_base = OTHER; note = 2'-O-methyluridine-3'-phosphorothioate
  modified_base 3: mod_base = OTHER; note = 2'-O-methylguanosine-3'-phosphate
  modified_base 4: mod_base = OTHER; note = 2'-O-methyladenosine-3'-phosphate
  modified_base 5: mod_base = OTHER; note = 2'-O-methyladenosine-3'-phosphate
  modified_base 6: mod_base = OTHER; note = 2'-O-hexadecyl-adenosine-3'-phosphate
  modified_base 7: mod_base = OTHER; note = 2'-deoxy-2'-fluorouridine-3'-phosphate
  modified_base 8: mod_base = OTHER; note = 2'-O-methyluridine-3'-phosphate
  modified_base 9: mod_base = OTHER; note = 2'-deoxy-2'-fluoroadenosine-3'-phosphate
  modified_base 10: mod_base = OTHER; note = 2'-deoxy-2'-fluoroadenosine-3'-phosphate
  modified_base 11: mod_base = OTHER; note = 2'-deoxy-2'-fluoroadenosine-3'-phosphate
  modified_base 12: mod_base = OTHER; note = 2'-O-methylcytidine-3'-phosphate
  modified_base 13: mod_base = OTHER; note = 2'-O-methylguanosine-3'-phosphate
  modified_base 14: mod_base = OTHER; note = 2'-O-methyladenosine-3'-phosphate
  modified_base 15: mod_base = OTHER; note = 2'-O-methylguanosine-3'-phosphate
  modified_base 16: mod_base = OTHER; note = 2'-O-methylcytidine-3'-phosphate
  modified_base 17: mod_base = OTHER; note = 2'-O-methylguanosine-3'-phosphate
  modified_base 18: mod_base = OTHER; note = 2'-O-methyladenosine-3'-phosphate
  modified_base 19: mod_base = OTHER; note = 2'-O-methyladenosine-3'-phosphorothioate
  modified_base 20: mod_base = OTHER; note = 2'-O-methylguanosine-3'-phosphorothioate
  modified_base 21: mod_base = OTHER; note = 2'-O-methyladenosine
ctgaaattaaacgagcgaaga

SEQ ID NO: 568 - RNA, 23 nt, synthetic construct
  source 1..23: mol_type = other RNA
  modified_base 1: mod_base = OTHER; note = 2'-O-methyluridine-3'-phosphorothioate 5'-(E)-Vinylphosphonate
  modified_base 2: mod_base = OTHER; note = 2'-deoxy-2'-fluorocytidine-3'-phosphorothioate
  modified_base 3: mod_base = OTHER; note = 2'-O-methyluridine-3'-phosphate
  modified_base 4: mod_base = OTHER; note = 2'-O-methyluridine-3'-phosphate
  modified_base 5: mod_base = OTHER; note = 2'-O-methylcytidine-3'-phosphate
  modified_base 6: mod_base = OTHER; note = 2'-deoxy-2'-fluoroguanosine-3'-phosphate
  modified_base 7: mod_base = OTHER; note = 2'-O-methylcytidine-3'-phosphate
  modified_base 8: mod_base = OTHER; note = 2'-deoxy-2'-fluorouridine-3'-phosphate
  modified_base 9: mod_base = OTHER; note = 2'-deoxy-2'-fluorocytidine-3'-phosphate
  modified_base 10: mod_base = OTHER; note = 2'-O-methylguanosine-3'-phosphate
  modified_base 11: mod_base = OTHER; note = 2'-O-methyluridine-3'-phosphate
  modified_base 12: mod_base = OTHER; note = 2'-O-methyluridine-3'-phosphate
  modified_base 13: mod_base = OTHER; note = 2'-O-methyluridine-3'-phosphate
  modified_base 14: mod_base = OTHER; note = 2'-deoxy-2'-fluoroadenosine-3'-phosphate
  modified_base 15: mod_base = OTHER; note = 2'-O-methyladenosine-3'-phosphate
  modified_base 16: mod_base = OTHER; note = 2'-deoxy-2'-fluorouridine-3'-phosphate
  modified_base 17: mod_base = OTHER; note = 2'-O-methyluridine-3'-phosphate
  modified_base 18: mod_base = OTHER; note = 2'-O-methyluridine-3'-phosphate
  modified_base 19: mod_base = OTHER; note = 2'-O-methylcytidine-3'-phosphate
  modified_base 20: mod_base = OTHER; note = 2'-O-methyladenosine-3'-phosphate
  modified_base 21: mod_base = OTHER; note = 2'-O-methylguanosine-3'-phosphorothioate
  modified_base 22: mod_base = OTHER; note = 2'-O-methyluridine-3'-phosphorothioate
  modified_base 23: mod_base = OTHER; note = 2'-O-methylcytidine
tcttcgctcgtttaatttcagtc

SEQ ID NO: 569 - RNA, 23 nt, synthetic construct
  source 1..23: mol_type = other RNA
gactgaaattaaacgagcgaaga

SEQ ID NO: 570 - RNA, 21 nt, synthetic construct
  source 1..21: mol_type = other RNA
  modified_base 1: mod_base = OTHER; note = 2'-O-methylguanosine-3'-phosphorothioate
  modified_base 2: mod_base = OTHER; note = 2'-O-methylguanosine-3'-phosphorothioate
  modified_base 3: mod_base = OTHER; note = 2'-O-methylguanosine-3'-phosphate
  modified_base 4: mod_base = OTHER; note = 2'-O-methyladenosine-3'-phosphate
  modified_base 5: mod_base = OTHER; note = 2'-O-methyladenosine-3'-phosphate
  modified_base 6: mod_base = OTHER; note = 2'-O-hexadecyl-adenosine-3'-phosphate
  modified_base 7: mod_base = OTHER; note = 2'-deoxy-2'-fluorocytidine-3'-phosphate
  modified_base 8: mod_base = OTHER; note = 2'-O-methylcytidine-3'-phosphate
  modified_base 9: mod_base = OTHER; note = 2'-deoxy-2'-fluorocytidine-3'-phosphate
  modified_base 10: mod_base = OTHER; note = 2'-deoxy-2'-fluorouridine-3'-phosphate
  modified_base 11: mod_base = OTHER; note = 2'-deoxy-2'-fluorouridine-3'-phosphate
  modified_base 12: mod_base = OTHER; note = 2'-O-methyluridine-3'-phosphate
  modified_base 13: mod_base = OTHER; note = 2'-O-methyluridine-3'-phosphate
  modified_base 14: mod_base = OTHER; note = 2'-O-methylguanosine-3'-phosphate
  modified_base 15: mod_base = OTHER; note = 2'-O-methylcytidine-3'-phosphate
  modified_base 16: mod_base = OTHER; note = 2'-O-methylguanosine-3'-phosphate
  modified_base 17: mod_base = OTHER; note = 2'-O-methyluridine-3'-phosphate
  modified_base 18: mod_base = OTHER; note = 2'-O-methylguanosine-3'-phosphate
  modified_base 19: mod_base = OTHER; note = 2'-O-methylguanosine-3'-phosphorothioate
  modified_base 20: mod_base = OTHER; note = 2'-O-methyluridine-3'-phosphorothioate
  modified_base 21: mod_base = OTHER; note = 2'-O-methyladenosine
gggaaacccttttgcgtggta

SEQ ID NO: 571 - RNA, 23 nt, synthetic construct
  source 1..23: mol_type = other RNA
  modified_base 1: mod_base = OTHER; note = 2'-O-methyluridine-3'-phosphorothioate 5'-(E)-Vinylphosphonate
  modified_base 2: mod_base = OTHER; note = 2'-deoxy-2'-fluoroadenosine-3'-phosphorothioate
  modified_base 3: mod_base = OTHER; note = 2'-O-methylcytidine-3'-phosphate
  modified_base 4: mod_base = OTHER; note = 2'-O-methylcytidine-3'-phosphate
  modified_base 5: mod_base = OTHER; note = 2'-O-methyladenosine-3'-phosphate
  modified_base 6: mod_base = OTHER; note = 2'-deoxy-2'-fluorocytidine-3'-phosphate
  modified_base 7: mod_base = OTHER; note = 2'-O-methylguanosine-3'-phosphate
  modified_base 8: mod_base = OTHER; note = 2'-deoxy-2'-fluorocytidine-3'-phosphate
  modified_base 9: mod_base = OTHER; note = 2'-deoxy-2'-fluoroadenosine-3'-phosphate
  modified_base 10: mod_base = OTHER; note = 2'-O-methyladenosine-3'-phosphate
  modified_base 11: mod_base = OTHER; note = 2'-O-methyladenosine-3'-phosphate
  modified_base 12: mod_base = OTHER; note = 2'-O-methyladenosine-3'-phosphate
  modified_base 13: mod_base = OTHER; note = 2'-O-methylguanosine-3'-phosphate
  modified_base 14: mod_base = OTHER; note = 2'-deoxy-2'-fluoroguanosine-3'-phosphate
  modified_base 15: mod_base = OTHER; note = 2'-O-methylguanosine-3'-phosphate
  modified_base 16: mod_base = OTHER; note = 2'-deoxy-2'-fluorouridine-3'-phosphate
  modified_base 17: mod_base = OTHER; note = 2'-O-methyluridine-3'-phosphate
  modified_base 18: mod_base = OTHER; note = 2'-O-methyluridine-3'-phosphate
  modified_base 19: mod_base = OTHER; note = 2'-O-methylcytidine-3'-phosphate
  modified_base 20: mod_base = OTHER; note = 2'-O-methylcytidine-3'-phosphate
  modified_base 21: mod_base = OTHER; note = 2'-O-methylcytidine-3'-phosphorothioate
  modified_base 22: mod_base = OTHER; note = 2'-O-methyladenosine-3'-phosphorothioate
  modified_base 23: mod_base = OTHER; note = 2'-O-methylcytidine
taccacgcaaaagggtttcccac

SEQ ID NO: 572 - RNA, 23 nt, synthetic construct
  source 1..23: mol_type = other RNA
gtgggaaacccttttgcgtggtc

SEQ ID NO: 573 - RNA, 21 nt, synthetic construct
  source 1..21: mol_type = other RNA
  modified_base 1: mod_base = OTHER; note = 2'-O-methyluridine-3'-phosphorothioate
  modified_base 2: mod_base = OTHER; note = 2'-O-methyladenosine-3'-phosphorothioate
  modified_base 3: mod_base = OTHER; note = 2'-O-methyluridine-3'-phosphate
  modified_base 4: mod_base = OTHER; note = 2'-O-methyladenosine-3'-phosphate
  modified_base 5: mod_base = OTHER; note = 2'-O-methyluridine-3'-phosphate
  modified_base 6: mod_base = OTHER; note = 2'-O-hexadecyl-uridine-3'-phosphate
  modified_base 7: mod_base = OTHER; note = 2'-deoxy-2'-fluorouridine-3'-phosphate
  modified_base 8: mod_base = OTHER; note = 2'-O-methylguanosine-3'-phosphate
  modified_base 9: mod_base = OTHER; note = 2'-deoxy-2'-fluorouridine-3'-phosphate
  modified_base 10: mod_base = OTHER; note = 2'-deoxy-2'-fluoroadenosine-3'-phosphate
  modified_base 11: mod_base = OTHER; note = 2'-deoxy-2'-fluoroadenosine-3'-phosphate
  modified_base 12: mod_base = OTHER; note = 2'-O-methylcytidine-3'-phosphate
  modified_base 13: mod_base = OTHER; note = 2'-O-methyluridine-3'-phosphate
  modified_base 14: mod_base = OTHER; note = 2'-O-methyluridine-3'-phosphate
  modified_base 15: mod_base = OTHER; note = 2'-O-methyluridine-3'-phosphate
  modified_base 16: mod_base = OTHER; note = 2'-O-methylguanosine-3'-phosphate
  modified_base 17: mod_base = OTHER; note = 2'-O-methylcytidine-3'-phosphate
  modified_base 18: mod_base = OTHER; note = 2'-O-methyladenosine-3'-phosphate
  modified_base 19: mod_base = OTHER; note = 2'-O-methyluridine-3'-phosphorothioate
  modified_base 20: mod_base = OTHER; note = 2'-O-methylguanosine-3'-phosphorothioate
  modified_base 21: mod_base = OTHER; note = 2'-O-methyladenosine
tatatttgtaactttgcatga

SEQ ID NO: 574 - RNA, 23 nt, synthetic construct
  source 1..23: mol_type = other RNA
  modified_base 1: mod_base = OTHER; note = 2'-O-methyluridine-3'-phosphorothioate 5'-(E)-Vinylphosphonate
  modified_base 2: mod_base = OTHER; note = 2'-deoxy-2'-fluorocytidine-3'-phosphorothioate
  modified_base 3: mod_base = OTHER; note = 2'-O-methyladenosine-3'-phosphate
  modified_base 4: mod_base = OTHER; note = 2'-O-methyluridine-3'-phosphate
  modified_base 5: mod_base = OTHER; note = 2'-O-methylguanosine-3'-phosphate
  modified_base 6: mod_base = OTHER; note = 2'-deoxy-2'-fluorocytidine-3'-phosphate
  modified_base 7: mod_base = OTHER; note = 2'-O-methyladenosine-3'-phosphate
  modified_base 8: mod_base = OTHER; note = 2'-deoxy-2'-fluoroadenosine-3'-phosphate
  modified_base 9: mod_base = OTHER; note = 2'-deoxy-2'-fluoroadenosine-3'-phosphate
  modified_base 10: mod_base = OTHER; note = 2'-O-methylguanosine-3'-phosphate
  modified_base 11: mod_base = OTHER; note = 2'-O-methyluridine-3'-phosphate
  modified_base 12: mod_base = OTHER; note = 2'-O-methyluridine-3'-phosphate
  modified_base 13: mod_base = OTHER; note = 2'-O-methyladenosine-3'-phosphate
  modified_base 14: mod_base = OTHER; note = 2'-deoxy-2'-fluorocytidine-3'-phosphate
  modified_base 15: mod_base = OTHER; note = 2'-O-methyladenosine-3'-phosphate
  modified_base 16: mod_base = OTHER; note = 2'-deoxy-2'-fluoroadenosine-3'-phosphate
  modified_base 17: mod_base = OTHER; note = 2'-O-methyladenosine-3'-phosphate
  modified_base 18: mod_base = OTHER; note = 2'-O-methyluridine-3'-phosphate
  modified_base 19: mod_base = OTHER; note = 2'-O-methyladenosine-3'-phosphate
  modified_base 20: mod_base = OTHER; note = 2'-O-methyluridine-3'-phosphate
  modified_base 21: mod_base = OTHER; note = 2'-O-methyladenosine-3'-phosphorothioate
  modified_base 22: mod_base = OTHER; note = 2'-O-methylguanosine-3'-phosphorothioate
  modified_base 23: mod_base = OTHER; note = 2'-O-methyladenosine
tcatgcaaagttacaaatataga

SEQ ID NO: 575 - RNA, 23 nt, synthetic construct
  source 1..23: mol_type = other RNA
tctatatttgtaactttgcatgt

SEQ ID NO: 576 - RNA, 21 nt, synthetic construct
  source 1..21: mol_type = other RNA
  modified_base 1: mod_base = OTHER; note = 2'-O-methyluridine-3'-phosphorothioate
  modified_base 2: mod_base = OTHER; note = 2'-O-methylguanosine-3'-phosphorothioate
  modified_base 3: mod_base = OTHER; note = 2'-O-methylcytidine-3'-phosphate
  modified_base 4: mod_base = OTHER; note = 2'-O-methyladenosine-3'-phosphate
  modified_base 5: mod_base = OTHER; note = 2'-O-methylcytidine-3'-phosphate
  modified_base 6: mod_base = OTHER; note = 2'-O-hexadecyl-guanosine-3'-phosphate
  modified_base 7: mod_base = OTHER; note = 2'-deoxy-2'-fluoroadenosine-3'-phosphate
  modified_base 8: mod_base = OTHER; note = 2'-O-methylcytidine-3'-phosphate
  modified_base 9: mod_base = OTHER; note = 2'-deoxy-2'-fluorouridine-3'-phosphate
  modified_base 10: mod_base = OTHER; note = 2'-deoxy-2'-fluoroguanosine-3'-phosphate
  modified_base 11: mod_base = OTHER; note = 2'-deoxy-2'-fluorocytidine-3'-phosphate
  modified_base 12: mod_base = OTHER; note = 2'-O-methylguanosine-3'-phosphate
  modified_base 13: mod_base = OTHER; note = 2'-O-methyluridine-3'-phosphate
  modified_base 14: mod_base = OTHER; note = 2'-O-methylcytidine-3'-phosphate
  modified_base 15: mod_base = OTHER; note = 2'-O-methyladenosine-3'-phosphate
  modified_base 16: mod_base = OTHER; note = 2'-O-methyladenosine-3'-phosphate
  modified_base 17: mod_base = OTHER; note = 2'-O-methyluridine-3'-phosphate
  modified_base 18: mod_base = OTHER; note = 2'-O-methyladenosine-3'-phosphate
  modified_base 19: mod_base = OTHER; note = 2'-O-methyluridine-3'-phosphorothioate
  modified_base 20: mod_base = OTHER; note = 2'-O-methylcytidine-3'-phosphorothioate
  modified_base 21: mod_base = OTHER; note = 2'-O-methyladenosine
tgcacgactgcgtcaatatca

SEQ ID NO: 577 - RNA, 23 nt, synthetic construct
  source 1..23: mol_type = other RNA
  modified_base 1: mod_base = OTHER; note = 2'-O-methyluridine-3'-phosphorothioate 5'-(E)-Vinylphosphonate
  modified_base 2: mod_base = OTHER; note = 2'-deoxy-2'-fluoroguanosine-3'-phosphorothioate
  modified_base 3: mod_base = OTHER; note = 2'-O-methyladenosine-3'-phosphate
  modified_base 4: mod_base = OTHER; note = 2'-O-methyluridine-3'-phosphate
  modified_base 5: mod_base = OTHER; note = 2'-O-methyladenosine-3'-phosphate
  modified_base 6: mod_base = OTHER; note = 2'-deoxy-2'-fluorouridine-3'-phosphate
  modified_base 7: mod_base = OTHER; note = 2'-O-methyluridine-3'-phosphate
  modified_base 8: mod_base = OTHER; note = 2'-deoxy-2'-fluoroguanosine-3'-phosphate
  modified_base 9: mod_base = OTHER; note = 2'-deoxy-2'-fluoroadenosine-3'-phosphate
  modified_base 10: mod_base = OTHER; note = 2'-O-methylcytidine-3'-phosphate
  modified_base 11: mod_base = OTHER; note = 2'-O-methylguanosine-3'-phosphate
  modified_base 12: mod_base = OTHER; note = 2'-O-methylcytidine-3'-phosphate
  modified_base 13: mod_base = OTHER; note = 2'-O-methyladenosine-3'-phosphate
  modified_base 14: mod_base = OTHER; note = 2'-deoxy-2'-fluoroguanosine-3'-phosphate
  modified_base 15: mod_base = OTHER; note = 2'-O-methyluridine-3'-phosphate
  modified_base 16: mod_base = OTHER; note = 2'-deoxy-2'-fluorocytidine-3'-phosphate
  modified_base 17: mod_base = OTHER; note = 2'-O-methylguanosine-3'-phosphate
  modified_base 18: mod_base = OTHER; note = 2'-O-methyluridine-3'-phosphate
  modified_base 19: mod_base = OTHER; note = 2'-O-methylguanosine-3'-phosphate
  modified_base 20: mod_base = OTHER; note = 2'-O-methylcytidine-3'-phosphate
  modified_base 21: mod_base = OTHER; note = 2'-O-methyladenosine-3'-phosphorothioate
  modified_base 22: mod_base = OTHER; note = 2'-O-methylcytidine-3'-phosphorothioate
  modified_base 23: mod_base = OTHER; note = 2'-O-methyladenosine
tgatattgacgcagtcgtgcaca

SEQ ID NO: 578 - RNA, 23 nt, synthetic construct
  source 1..23: mol_type = other RNA
tgtgcacgactgcgtcaatatca

SEQ ID NO: 579 - RNA, 21 nt, synthetic construct
  source 1..21: mol_type = other RNA
  modified_base 1: mod_base = OTHER; note = 2'-O-methylguanosine-3'-phosphorothioate
  modified_base 2: mod_base = OTHER; note = 2'-O-methyladenosine-3'-phosphorothioate
  modified_base 3: mod_base = OTHER; note = 2'-O-methylguanosine-3'-phosphate
  modified_base 4: mod_base = OTHER; note = 2'-O-methyladenosine-3'-phosphate
  modified_base 5: mod_base = OTHER; note = 2'-O-methyladenosine-3'-phosphate
  modified_base 6: mod_base = OTHER; note = 2'-O-hexadecyl-cytidine-3'-phosphate
  modified_base 7: mod_base = OTHER; note = 2'-deoxy-2'-fluorouridine-3'-phosphate
  modified_base 8: mod_base = OTHER; note = 2'-O-methyluridine-3'-phosphate
  modified_base 9: mod_base = OTHER; note = 2'-deoxy-2'-fluorocytidine-3'-phosphate
  modified_base 10: mod_base = OTHER; note = 2'-deoxy-2'-fluoroadenosine-3'-phosphate
  modified_base 11: mod_base = OTHER; note = 2'-deoxy-2'-fluorocytidine-3'-phosphate
  modified_base 12: mod_base = OTHER; note = 2'-O-methylcytidine-3'-phosphate
  modified_base 13: mod_base = OTHER; note = 2'-O-methylguanosine-3'-phosphate
  modified_base 14: mod_base = OTHER; note = 2'-O-methyladenosine-3'-phosphate
  modified_base 15: mod_base = OTHER; note = 2'-O-methylguanosine-3'-phosphate
  modified_base 16: mod_base = OTHER; note = 2'-O-methyladenosine-3'-phosphate
  modified_base 17: mod_base = OTHER; note = 2'-O-methylcytidine-3'-phosphate
  modified_base 18: mod_base = OTHER; note = 2'-O-methylcytidine-3'-phosphate
  modified_base 19: mod_base = OTHER; note = 2'-O-methylguanosine-3'-phosphorothioate
  modified_base 20: mod_base = OTHER; note = 2'-O-methyladenosine-3'-phosphorothioate
  modified_base 21: mod_base = OTHER; note = 2'-O-methyladenosine
gagaacttcaccgagaccgaa

SEQ ID NO: 580 - RNA, 23 nt, synthetic construct
  source 1..23: mol_type = other RNA
  modified_base 1: mod_base = OTHER; note = 2'-O-methyluridine-3'-phosphorothioate 5'-(E)-Vinylphosphonate
  modified_base 2: mod_base = OTHER; note = 2'-deoxy-2'-fluorouridine-3'-phosphorothioate
  modified_base 3: mod_base = OTHER; note = 2'-O-methylcytidine-3'-phosphate
  modified_base 4: mod_base = OTHER; note = 2'-O-methylguanosine-3'-phosphate
  modified_base 5: mod_base = OTHER; note = 2'-O-methylguanosine-3'-phosphate
  modified_base 6: mod_base = OTHER; note = 2'-deoxy-2'-fluorouridine-3'-phosphate
  modified_base 7: mod_base = OTHER; note = 2'-O-methylcytidine-3'-phosphate
  modified_base 8: mod_base = OTHER; note = 2'-deoxy-2'-fluorouridine-3'-phosphate
  modified_base 9: mod_base = OTHER; note = 2'-deoxy-2'-fluorocytidine-3'-phosphate
  modified_base 10: mod_base = OTHER; note = 2'-O-methylguanosine-3'-phosphate
  modified_base 11: mod_base = OTHER; note = 2'-O-methylguanosine-3'-phosphate
  modified_base 12: mod_base = OTHER; note = 2'-O-methyluridine-3'-phosphate
  modified_base 13: mod_base = OTHER; note = 2'-O-methylguanosine-3'-phosphate
  modified_base 14: mod_base = OTHER; note = 2'-deoxy-2'-fluoroadenosine-3'-phosphate
  modified_base 15: mod_base = OTHER; note = 2'-O-methyladenosine-3'-phosphate
  modified_base 16: mod_base = OTHER; note = 2'-deoxy-2'-fluoroguanosine-3'-phosphate
  modified_base 17: mod_base = OTHER; note = 2'-O-methyluridine-3'-phosphate
  modified_base 18: mod_base = OTHER; note = 2'-O-methyluridine-3'-phosphate
  modified_base 19: mod_base = OTHER; note = 2'-O-methylcytidine-3'-phosphate
  modified_base 20: mod_base = OTHER; note = 2'-O-methyluridine-3'-phosphate
  modified_base 21: mod_base = OTHER; note = 2'-O-methylcytidine-3'-phosphorothioate
  modified_base 22: mod_base = OTHER; note = 2'-O-methylcytidine-3'-phosphorothioate
  modified_base 23: mod_base = OTHER; note = 2'-O-methylcytidine
ttcggtctcggtgaagttctccc

SEQ ID NO: 581 - RNA, 23 nt, synthetic construct
  source 1..23: mol_type = other RNA
gggagaacttcaccgagaccgac

SEQ ID NO: 582 - RNA, 21 nt, synthetic construct
  source 1..21: mol_type = other RNA
  modified_base 1: mod_base = OTHER; note = 2'-O-methyladenosine-3'-phosphorothioate
  modified_base 2: mod_base = OTHER; note = 2'-O-methylguanosine-3'-phosphorothioate
  modified_base 3: mod_base = OTHER; note = 2'-O-methylcytidine-3'-phosphate
  modified_base 4: mod_base = OTHER; note = 2'-O-methylcytidine-3'-phosphate
  modified_base 5: mod_base = OTHER; note = 2'-O-methylguanosine-3'-phosphate
  modified_base 6: mod_base = OTHER; note = 2'-O-hexadecyl-adenosine-3'-phosphate
  modified_base 7: mod_base = OTHER; note = 2'-deoxy-2'-fluoroguanosine-3'-phosphate
  modified_base 8: mod_base = OTHER; note = 2'-O-methyluridine-3'-phosphate
  modified_base 9: mod_base = OTHER; note = 2'-deoxy-2'-fluoroadenosine-3'-phosphate
  modified_base 10: mod_base = OTHER; note = 2'-deoxy-2'-fluoroadenosine-3'-phosphate
  modified_base 11: mod_base = OTHER; note = 2'-deoxy-2'-fluoroguanosine-3'-phosphate
  modified_base 12: mod_base = OTHER; note = 2'-O-methylcytidine-3'-phosphate
  modified_base 13: mod_base = OTHER; note = 2'-O-methylcytidine-3'-phosphate
  modified_base 14: mod_base = OTHER; note = 2'-O-methyladenosine-3'-phosphate
  modified_base 15: mod_base = OTHER; note = 2'-O-methyladenosine-3'-phosphate
  modified_base 16: mod_base = OTHER; note = 2'-O-methyladenosine-3'-phosphate
  modified_base 17: mod_base = OTHER; note = 2'-O-methyladenosine-3'-phosphate
  modified_base 18: mod_base = OTHER; note = 2'-O-methyladenosine-3'-phosphate
  modified_base 19: mod_base = OTHER; note = 2'-O-methylcytidine-3'-phosphorothioate
  modified_base 20: mod_base = OTHER; note = 2'-O-methylcytidine-3'-phosphorothioate
  modified_base 21: mod_base = OTHER; note = 2'-O-methyladenosine
agccgagtaagccaaaaacca

SEQ ID NO: 583 - RNA, 23 nt, synthetic construct
  source 1..23: mol_type = other RNA
  modified_base 1: mod_base = OTHER; note = 2'-O-methyluridine-3'-phosphorothioate 5'-(E)-Vinylphosphonate
  modified_base 2: mod_base = OTHER; note = 2'-deoxy-2'-fluoroguanosine-3'-phosphorothioate
  modified_base 3: mod_base = OTHER; note = 2'-O-methylguanosine-3'-phosphate
  modified_base 4: mod_base = OTHER; note = 2'-O-methyluridine-3'-phosphate
  modified_base 5: mod_base = OTHER; note = 2'-O-methyluridine-3'-phosphate
  modified_base 6: mod_base = OTHER; note = 2'-deoxy-2'-fluorouridine-3'-phosphate
  modified_base 7: mod_base = OTHER; note = 2'-O-methyluridine-3'-phosphate
  modified_base 8: mod_base = OTHER; note = 2'-deoxy-2'-fluorouridine-3'-phosphate
  modified_base 9: mod_base = OTHER; note = 2'-deoxy-2'-fluoroguanosine-3'-phosphate
  modified_base 10: mod_base = OTHER; note = 2'-O-methylguanosine-3'-phosphate
  modified_base 11: mod_base = OTHER; note = 2'-O-methylcytidine-3'-phosphate
  modified_base 12: mod_base = OTHER; note = 2'-O-methyluridine-3'-phosphate
  modified_base 13: mod_base = OTHER; note = 2'-O-methyluridine-3'-phosphate
  modified_base 14: mod_base = OTHER; note = 2'-deoxy-2'-fluoroadenosine-3'-phosphate
  modified_base 15: mod_base = OTHER; note = 2'-O-methylcytidine-3'-phosphate
  modified_base 16: mod_base = OTHER; note = 2'-deoxy-2'-fluorouridine-3'-phosphate
  modified_base 17: mod_base = OTHER; note = 2'-O-methylcytidine-3'-phosphate
  modified_base 18: mod_base = OTHER; note = 2'-O-methylguanosine-3'-phosphate
  modified_base 19: mod_base = OTHER; note = 2'-O-methylguanosine-3'-phosphate
  modified_base 20: mod_base = OTHER; note = 2'-O-methylcytidine-3'-phosphate
  modified_base 21: mod_base = OTHER; note = 2'-O-methyluridine-3'-phosphorothioate
  modified_base 22: mod_base = OTHER; note = 2'-O-methyluridine-3'-phosphorothioate
  modified_base 23: mod_base = OTHER; note = 2'-O-methylguanosine
tggtttttggcttactcggcttg

SEQ ID NO: 584 - RNA, 23 nt, synthetic construct
  source 1..23: mol_type = other RNA
caagccgagtaagccaaaaacca

SEQ ID NO: 585 - RNA, 21 nt, synthetic construct
  source 1..21: mol_type = other RNA
  modified_base 1: mod_base = OTHER; note = 2'-O-methylcytidine-3'-phosphorothioate
  modified_base 2: mod_base = OTHER; note = 2'-O-methyladenosine-3'-phosphorothioate
  modified_base 3: mod_base = OTHER; note = 2'-O-methyladenosine-3'-phosphate
  modified_base 4: mod_base = OTHER; note = 2'-O-methylguanosine-3'-phosphate
  modified_base 5: mod_base = OTHER; note = 2'-O-methylcytidine-3'-phosphate
  modified_base 6: mod_base = OTHER; note = 2'-O-hexadecyl-adenosine-3'-phosphate
  modified_base 7: mod_base = OTHER; note = 2'-deoxy-2'-fluoroguanosine-3'-phosphate
  modified_base 8: mod_base = OTHER; note = 2'-O-methylcytidine-3'-phosphate
  modified_base 9: mod_base = OTHER; note = 2'-deoxy-2'-fluoroadenosine-3'-phosphate
  modified_base 10: mod_base = OTHER; note = 2'-deoxy-2'-fluorocytidine-3'-phosphate
  modified_base 11: mod_base = OTHER; note = 2'-deoxy-2'-fluoroadenosine-3'-phosphate
  modified_base 12: mod_base = OTHER; note = 2'-O-methylcytidine-3'-phosphate
  modified_base 13: mod_base = OTHER; note = 2'-O-methylguanosine-3'-phosphate
  modified_base 14: mod_base = OTHER; note = 2'-O-methylguanosine-3'-phosphate
  modified_base 15: mod_base = OTHER; note = 2'-O-methyluridine-3'-phosphate
  modified_base 16: mod_base = OTHER; note = 2'-O-methylcytidine-3'-phosphate
  modified_base 17: mod_base = OTHER; note = 2'-O-methyladenosine-3'-phosphate
  modified_base 18: mod_base = OTHER; note = 2'-O-methylcytidine-3'-phosphate
  modified_base 19: mod_base = OTHER; note = 2'-O-methylcytidine-3'-phosphorothioate
  modified_base 20: mod_base = OTHER; note = 2'-O-methyladenosine-3'-phosphorothioate
  modified_base 21: mod_base = OTHER; note = 2'-O-methyladenosine
caagcagcacacggtcaccaa

SEQ ID NO: 586 - RNA, 23 nt, synthetic construct
  source 1..23: mol_type = other RNA
  modified_base 1: mod_base = OTHER; note = 2'-O-methyluridine-3'-phosphorothioate 5'-(E)-Vinylphosphonate
  modified_base 2: mod_base = OTHER; note = 2'-deoxy-2'-fluorouridine-3'-phosphorothioate
  modified_base 3: mod_base = OTHER; note = 2'-O-methylguanosine-3'-phosphate
  modified_base 4: mod_base = OTHER; note = 2'-O-methylguanosine-3'-phosphate
  modified_base 5: mod_base = OTHER; note = 2'-O-methyluridine-3'-phosphate
  modified_base 6: mod_base = OTHER; note = 2'-deoxy-2'-fluoroguanosine-3'-phosphate
  modified_base 7: mod_base = OTHER; note = 2'-O-methyladenosine-3'-phosphate
  modified_base 8: mod_base = OTHER; note = 2'-deoxy-2'-fluorocytidine-3'-phosphate
  modified_base 9: mod_base = OTHER; note = 2'-deoxy-2'-fluorocytidine-3'-phosphate
  modified_base 10: mod_base = OTHER; note = 2'-O-methylguanosine-3'-phosphate
  modified_base 11: mod_base = OTHER; note = 2'-O-methyluridine-3'-phosphate
  modified_base 12: mod_base = OTHER; note = 2'-O-methylguanosine-3'-phosphate
  modified_base 13: mod_base = OTHER; note = 2'-O-methyluridine-3'-phosphate
  modified_base 14: mod_base = OTHER; note = 2'-deoxy-2'-fluoroguanosine-3'-phosphate
  modified_base 15: mod_base = OTHER; note = 2'-O-methylcytidine-3'-phosphate
  modified_base 16: mod_base = OTHER; note = 2'-deoxy-2'-fluorouridine-3'-phosphate
  modified_base 17: mod_base = OTHER; note = 2'-O-methylguanosine-3'-phosphate
  modified_base 18: mod_base = OTHER; note = 2'-O-methylcytidine-3'-phosphate
  modified_base 19: mod_base = OTHER; note = 2'-O-methyluridine-3'-phosphate
  modified_base 20: mod_base = OTHER; note = 2'-O-methyluridine-3'-phosphate
  modified_base 21: mod_base = OTHER; note = 2'-O-methylguanosine-3'-phosphorothioate
  modified_base 22: mod_base = OTHER; note = 2'-O-methyladenosine-3'-phosphorothioate
  modified_base 23: mod_base = OTHER; note = 2'-O-methyluridine
ttggtgaccgtgtgctgcttgat

SEQ ID NO: 587 - RNA, 23 nt, synthetic construct
  source 1..23: mol_type = other RNA
atcaagcagcacacggtcaccac

SEQ ID NO: 588 - RNA, 21 nt, synthetic construct
  source 1..21: mol_type = other RNA
  modified_base 1: mod_base = OTHER; note = 2'-O-methyluridine-3'-phosphorothioate
  modified_base 2: mod_base = OTHER; note = 2'-O-methylcytidine-3'-phosphorothioate
  modified_base 3: mod_base = OTHER; note = 2'-O-methyluridine-3'-phosphate
  modified_base 4: mod_base = OTHER; note = 2'-O-methyladenosine-3'-phosphate
  modified_base 5: mod_base = OTHER; note = 2'-O-methyluridine-3'-phosphate
  modified_base 6: mod_base = OTHER; note = 2'-O-hexadecyl-adenosine-3'-phosphate
  modified_base 7: mod_base = OTHER; note = 2'-deoxy-2'-fluorouridine-3'-phosphate
  modified_base 8: mod_base = OTHER; note = 2'-O-methyluridine-3'-phosphate
  modified_base 9: mod_base = OTHER; note = 2'-deoxy-2'-fluorouridine-3'-phosphate
  modified_base 10: mod_base = OTHER; note = 2'-deoxy-2'-fluoroguanosine-3'-phosphate
  modified_base 11: mod_base = OTHER; note = 2'-deoxy-2'-fluorouridine-3'-phosphate
  modified_base 12: mod_base = OTHER; note = 2'-O-methyladenosine-3'-phosphate
  modified_base 13: mod_base = OTHER; note = 2'-O-methyladenosine-3'-phosphate
  modified_base 14: mod_base = OTHER; note = 2'-O-methylcytidine-3'-phosphate
  modified_base 15: mod_base = OTHER; note = 2'-O-methyluridine-3'-phosphate
  modified_base 16: mod_base = OTHER; note = 2'-O-methyluridine-3'-phosphate
  modified_base 17: mod_base = OTHER; note = 2'-O-methyluridine-3'-phosphate
  modified_base 18: mod_base = OTHER; note = 2'-O-methylguanosine-3'-phosphate
  modified_base 19: mod_base = OTHER; note = 2'-O-methylcytidine-3'-phosphorothioate
  modified_base 20: mod_base = OTHER; note = 2'-O-methyladenosine-3'-phosphorothioate
  modified_base 21: mod_base = OTHER; note = 2'-O-methyladenosine
tctatatttgtaactttgcaa

SEQ ID NO: 589 - RNA, 23 nt, synthetic construct
  source 1..23: mol_type = other RNA
  modified_base 1: mod_base = OTHER; note = 2'-O-methyluridine-3'-phosphorothioate 5'-(E)-Vinylphosphonate
  modified_base 2: mod_base = OTHER; note = 2'-deoxy-2'-fluorouridine-3'-phosphorothioate
  modified_base 3: mod_base = OTHER; note = 2'-O-methylguanosine-3'-phosphate
  modified_base 4: mod_base = OTHER; note = 2'-O-methylcytidine-3'-phosphate
  modified_base 5: mod_base = OTHER; note = 2'-O-methyladenosine-3'-phosphate
  modified_base 6: mod_base = OTHER; note = 2'-deoxy-2'-fluoroadenosine-3'-phosphate
  modified_base 7: mod_base = OTHER; note = 2'-O-methyladenosine-3'-phosphate
  modified_base 8: mod_base = OTHER; note = 2'-deoxy-2'-fluoroguanosine-3'-phosphate
  modified_base 9: mod_base = OTHER; note = 2'-deoxy-2'-fluorouridine-3'-phosphate
  modified_base 10: mod_base = OTHER; note = 2'-O-methyluridine-3'-phosphate
  modified_base 11: mod_base = OTHER; note = 2'-O-methyladenosine-3'-phosphate
  modified_base 12: mod_base = OTHER; note = 2'-O-methylcytidine-3'-phosphate
  modified_base 13: mod_base = OTHER; note = 2'-O-methyladenosine-3'-phosphate
  modified_base 14: mod_base = OTHER; note = 2'-deoxy-2'-fluoroadenosine-3'-phosphate
  modified_base 15: mod_base = OTHER; note = 2'-O-methyladenosine-3'-phosphate
  modified_base 16: mod_base = OTHER; note = 2'-deoxy-2'-fluorouridine-3'-phosphate
  modified_base 17: mod_base = OTHER; note = 2'-O-methyladenosine-3'-phosphate
  modified_base 18: mod_base = OTHER; note = 2'-O-methyluridine-3'-phosphate
  modified_base 19: mod_base = OTHER; note = 2'-O-methyladenosine-3'-phosphate
  modified_base 20: mod_base = OTHER; note = 2'-O-methylguanosine-3'-phosphate
  modified_base 21: mod_base = OTHER; note = 2'-O-methyladenosine-3'-phosphorothioate
  modified_base 22: mod_base = OTHER; note = 2'-O-methyladenosine-3'-phosphorothioate
  modified_base 23: mod_base = OTHER; note = 2'-O-methyladenosine
ttgcaaagttacaaatatagaaa

SEQ ID NO: 590 - RNA, 23 nt, synthetic construct
  source 1..23: mol_type = other RNA
tttctatatttgtaactttgcat

SEQ ID NO: 591 - RNA, 21 nt, synthetic construct
  source 1..21: mol_type = other RNA
  modified_base 1: mod_base = OTHER; note = 2'-O-methyluridine-3'-phosphorothioate
  modified_base 2: mod_base = OTHER; note = 2'-O-methylcytidine-3'-phosphorothioate
  modified_base 3: mod_base = OTHER; note = 2'-O-methyluridine-3'-phosphate
  modified_base 4: mod_base = OTHER; note = 2'-O-methylcytidine-3'-phosphate
  modified_base 5: mod_base = OTHER; note = 2'-O-methylcytidine-3'-phosphate
  modified_base 6: mod_base = OTHER; note = 2'-O-hexadecyl-uridine-3'-phosphate
  modified_base 7: mod_base = OTHER; note = 2'-deoxy-2'-fluorouridine-3'-phosphate
  modified_base 8: mod_base = OTHER; note = 2'-O-methyluridine-3'-phosphate
  modified_base 9: mod_base = OTHER; note = 2'-deoxy-2'-fluoroguanosine-3'-phosphate
  modified_base 10: mod_base = OTHER; note = 2'-deoxy-2'-fluorouridine-3'-phosphate
  modified_base 11: mod_base = OTHER; note = 2'-deoxy-2'-fluorocytidine-3'-phosphate
  modified_base 12: mod_base = OTHER; note = 2'-O-methylcytidine-3'-phosphate
  modified_base 13: mod_base = OTHER; note = 2'-O-methyladenosine-3'-phosphate
  modified_base 14: mod_base = OTHER; note = 2'-O-methyluridine-3'-phosphate
  modified_base 15: mod_base = OTHER; note = 2'-O-methyluridine-3'-phosphate
  modified_base 16: mod_base = OTHER; note = 2'-O-methyluridine-3'-phosphate
  modified_base 17: mod_base = OTHER; note = 2'-O-methyladenosine-3'-phosphate
  modified_base 18: mod_base = OTHER; note = 2'-O-methylcytidine-3'-phosphate
  modified_base 19: mod_base = OTHER; note = 2'-O-methylcytidine-3'-phosphorothioate
  modified_base 20: mod_base = OTHER; note = 2'-O-methyluridine-3'-phosphorothioate
  modified_base 21: mod_base = OTHER; note = 2'-O-methyladenosine
tctcctttgtccatttaccta

SEQ ID NO: 592 - RNA, 23 nt, synthetic construct
  source 1..23: mol_type = other RNA
  modified_base 1: mod_base = OTHER; note = 2'-O-methyluridine-3'-phosphorothioate 5'-(E)-Vinylphosphonate
  modified_base 2: mod_base = OTHER; note = 2'-deoxy-2'-fluoroadenosine-3'-phosphorothioate
  modified_base 3: mod_base = OTHER; note = 2'-O-methylguanosine-3'-phosphate
  modified_base 4: mod_base = OTHER; note = 2'-O-methylguanosine-3'-phosphate
  modified_base 5: mod_base = OTHER; note = 2'-O-methyluridine-3'-phosphate
  modified_base 6: mod_base = OTHER; note = 2'-deoxy-2'-fluoroadenosine-3'-phosphate
  modified_base 7: mod_base = OTHER; note = 2'-O-methyladenosine-3'-phosphate
  modified_base 8: mod_base = OTHER; note = 2'-deoxy-2'-fluoroadenosine-3'-phosphate
  modified_base 9: mod_base = OTHER; note = 2'-deoxy-2'-fluorouridine-3'-phosphate
  modified_base 10: mod_base = OTHER; note = 2'-O-methylguanosine-3'-phosphate
  modified_base 11: mod_base = OTHER; note = 2'-O-methylguanosine-3'-phosphate
  modified_base 12: mod_base = OTHER; note = 2'-O-methyladenosine-3'-phosphate
  modified_base 13: mod_base = OTHER; note = 2'-O-methylcytidine-3'-phosphate
  modified_base 14: mod_base = OTHER; note = 2'-deoxy-2'-fluoroadenosine-3'-phosphate
  modified_base 15: mod_base = OTHER; note = 2'-O-methyladenosine-3'-phosphate
  modified_base 16: mod_base = OTHER; note = 2'-deoxy-2'-fluoroadenosine-3'-phosphate
  modified_base 17: mod_base = OTHER; note = 2'-O-methylguanosine-3'-phosphate
  modified_base 18: mod_base = OTHER; note = 2'-O-methylguanosine-3'-phosphate
  modified_base 19: mod_base = OTHER; note = 2'-O-methyladenosine-3'-phosphate
  modified_base 20: mod_base = OTHER; note = 2'-O-methylguanosine-3'-phosphate
  modified_base 21: mod_base = OTHER; note = 2'-O-methyladenosine-3'-phosphorothioate
  modified_base 22: mod_base = OTHER; note = 2'-O-methyluridine-3'-phosphorothioate
  modified_base 23: mod_base = OTHER; note = 2'-O-methyluridine
taggtaaatggacaaaggagatt

SEQ ID NO: 593 - RNA, 23 nt, synthetic construct
  source 1..23: mol_type = other RNA
aatctcctttgtccatttacctg

SEQ ID NO: 594 - RNA, 21 nt, synthetic construct
  source 1..21: mol_type = other RNA
  modified_base 1: mod_base = OTHER; note = 2'-O-methyluridine-3'-phosphorothioate
  modified_base 2: mod_base = OTHER; note = 2'-O-methyluridine-3'-phosphorothioate
  modified_base 3: mod_base = OTHER; note = 2'-O-methyluridine-3'-phosphate
  modified_base 4: mod_base = OTHER; note = 2'-O-methylcytidine-3'-phosphate
  modified_base 5: mod_base = OTHER; note = 2'-O-methyluridine-3'-phosphate
  modified_base 6: mod_base = OTHER; note = 2'-O-hexadecyl-adenosine-3'-phosphate
  modified_base 7: mod_base = OTHER; note = 2'-deoxy-2'-fluorouridine-3'-phosphate
  modified_base 8: mod_base = OTHER; note = 2'-O-methyladenosine-3'-phosphate
  modified_base 9: mod_base = OTHER; note = 2'-deoxy-2'-fluorouridine-3'-phosphate
  modified_base 10: mod_base = OTHER; note = 2'-deoxy-2'-fluorouridine-3'-phosphate
  modified_base 11: mod_base = OTHER; note = 2'-deoxy-2'-fluorouridine-3'-phosphate
  modified_base 12: mod_base = OTHER; note = 2'-O-methylguanosine-3'-phosphate
  modified_base 13: mod_base = OTHER; note = 2'-O-methyluridine-3'-phosphate
  modified_base 14: mod_base = OTHER; note = 2'-O-methyladenosine-3'-phosphate
  modified_base 15: mod_base = OTHER; note = 2'-O-methyladenosine-3'-phosphate
  modified_base 16: mod_base = OTHER; note = 2'-O-methylcytidine-3'-phosphate
  modified_base 17: mod_base = OTHER; note = 2'-O-methyluridine-3'-phosphate
  modified_base 18: mod_base = OTHER; note = 2'-O-methyluridine-3'-phosphate
  modified_base 19: mod_base = OTHER; note = 2'-O-methyluridine-3'-phosphorothioate
  modified_base 20: mod_base = OTHER; note = 2'-O-methylguanosine-3'-phosphorothioate
  modified_base 21: mod_base = OTHER; note = 2'-O-methyladenosine
tttctatatttgtaactttga

SEQ ID NO: 595 - RNA, 23 nt, synthetic construct
  source 1..23: mol_type = other RNA
  modified_base 1: mod_base = OTHER; note = 2'-O-methyluridine-3'-phosphorothioate 5'-(E)-Vinylphosphonate
  modified_base 2: mod_base = OTHER; note = 2'-deoxy-2'-fluorocytidine-3'-phosphorothioate
  modified_base 3: mod_base = OTHER; note = 2'-O-methyladenosine-3'-phosphate
  modified_base 4: mod_base = OTHER; note = 2'-O-methyladenosine-3'-phosphate
  modified_base 5: mod_base = OTHER; note = 2'-O-methyladenosine-3'-phosphate
  modified_base 6: mod_base = OTHER; note = 2'-deoxy-2'-fluoroguanosine-3'-phosphate
  modified_base 7: mod_base = OTHER; note = 2'-O-methyluridine-3'-phosphate
  modified_base 8: mod_base = OTHER; note = 2'-deoxy-2'-fluorouridine-3'-phosphate
  modified_base 9: mod_base = OTHER; note = 2'-deoxy-2'-fluoroadenosine-3'-phosphate
  modified_base 10: mod_base = OTHER; note = 2'-O-methylcytidine-3'-phosphate
  modified_base 11: mod_base = OTHER; note = 2'-O-methyladenosine-3'-phosphate
  modified_base 12: mod_base = OTHER; note = 2'-O-methyladenosine-3'-phosphate
  modified_base 13: mod_base = OTHER; note = 2'-O-methyladenosine-3'-phosphate
  modified_base 14: mod_base = OTHER; note = 2'-deoxy-2'-fluorouridine-3'-phosphate
  modified_base 15: mod_base = OTHER; note = 2'-O-methyladenosine-3'-phosphate
  modified_base 16: mod_base = OTHER; note = 2'-deoxy-2'-fluorouridine-3'-phosphate
  modified_base 17: mod_base = OTHER; note = 2'-O-methyladenosine-3'-phosphate
  modified_base 18: mod_base = OTHER; note = 2'-O-methylguanosine-3'-phosphate
  modified_base 19: mod_base = OTHER; note = 2'-O-methyladenosine-3'-phosphate
  modified_base 20: mod_base = OTHER; note = 2'-O-methyladenosine-3'-phosphate
  modified_base 21: mod_base = OTHER; note = 2'-O-methyladenosine-3'-phosphorothioate
  modified_base 22: mod_base = OTHER; note = 2'-O-methyladenosine-3'-phosphorothioate
  modified_base 23: mod_base = OTHER; note = 2'-O-methyluridine
tcaaagttacaaatatagaaaat

SEQ ID NO: 596 - RNA, 23 nt, synthetic construct
  source 1..23: mol_type = other RNA
attttctatatttgtaactttgc

SEQ ID NO: 597 - RNA, 21 nt, synthetic construct
  source 1..21: mol_type = other RNA
  modified_base 1: mod_base = OTHER; note = 2'-O-methylcytidine-3'-phosphorothioate
  modified_base 2: mod_base = OTHER; note = 2'-O-methyladenosine-3'-phosphorothioate
  modified_base 3: mod_base = OTHER; note = 2'-O-methyladenosine-3'-phosphate
  modified_base 4: mod_base = OTHER; note = 2'-O-methylcytidine-3'-phosphate
  modified_base 5: mod_base = OTHER; note = 2'-O-methylcytidine-3'-phosphate
  modified_base 6: mod_base = OTHER; note = 2'-O-hexadecyl-adenosine-3'-phosphate
  modified_base 7: mod_base = OTHER; note = 2'-deoxy-2'-fluoroguanosine-3'-phosphate
  modified_base 8: mod_base = OTHER; note = 2'-O-methyladenosine-3'-phosphate
  modified_base 9: mod_base = OTHER; note = 2'-deoxy-2'-fluoroadenosine-3'-phosphate
  modified_base 10: mod_base = OTHER; note = 2'-deoxy-2'-fluorocytidine-3'-phosphate
  modified_base 11: mod_base = OTHER; note = 2'-deoxy-2'-fluoroadenosine-3'-phosphate
  modified_base 12: mod_base = OTHER; note = 2'-O-methyladenosine-3'-phosphate
  modified_base 13: mod_base = OTHER; note = 2'-O-methylcytidine-3'-phosphate
  modified_base 14: mod_base = OTHER; note = 2'-O-methyluridine-3'-phosphate
  modified_base 15: mod_base = OTHER; note = 2'-O-methyluridine-3'-phosphate
  modified_base 16: mod_base = OTHER; note = 2'-O-methyluridine-3'-phosphate
  modified_base 17: mod_base = OTHER; note = 2'-O-methylguanosine-3'-phosphate
  modified_base 18: mod_base = OTHER; note = 2'-O-methyluridine-3'-phosphate
  modified_base 19: mod_base = OTHER; note = 2'-O-methylguanosine-3'-phosphorothioate
  modified_base 20: mod_base = OTHER; note = 2'-O-methylcytidine-3'-phosphorothioate
  modified_base 21: mod_base = OTHER; note = 2'-O-methyladenosine
caaccagaacaactttgtgca

SEQ ID NO: 598 - RNA, 23 nt, synthetic construct
  source 1..23: mol_type = other RNA
  modified_base 1: mod_base = OTHER; note = 2'-O-methyluridine-3'-phosphorothioate 5'-(E)-Vinylphosphonate
  modified_base 2: mod_base = OTHER; note = 2'-deoxy-2'-fluoroguanosine-3'-phosphorothioate
  modified_base 3: mod_base = OTHER; note = 2'-O-methylcytidine-3'-phosphate
  modified_base 4: mod_base = OTHER; note = 2'-O-methyladenosine-3'-phosphate
  modified_base 5: mod_base = OTHER; note = 2'-O-methylcytidine-3'-phosphate
  modified_base 6: mod_base = OTHER; note = 2'-deoxy-2'-fluoroadenosine-3'-phosphate
  modified_base 7: mod_base = OTHER; note = 2'-O-methyladenosine-3'-phosphate
  modified_base 8: mod_base = OTHER; note = 2'-deoxy-2'-fluoroadenosine-3'-phosphate
  modified_base 9: mod_base = OTHER; note = 2'-deoxy-2'-fluoroguanosine-3'-phosphate
  modified_base 10: mod_base = OTHER; note = 2'-O-methyluridine-3'-phosphate
  modified_base 11: mod_base = OTHER; note = 2'-O-methyluridine-3'-phosphate
  modified_base 12: mod_base = OTHER; note = 2'-O-methylguanosine-3'-phosphate
  modified_base 13: mod_base = OTHER; note = 2'-O-methyluridine-3'-phosphate
  modified_base 14: mod_base = OTHER; note = 2'-deoxy-2'-fluorouridine-3'-phosphate
  modified_base 15: mod_base = OTHER; note = 2'-O-methylcytidine-3'-phosphate
  modified_base 16: mod_base = OTHER; note = 2'-deoxy-2'-fluorouridine-3'-phosphate
  modified_base 17: mod_base = OTHER; note = 2'-O-methylguanosine-3'-phosphate
  modified_base 18: mod_base = OTHER; note = 2'-O-methylguanosine-3'-phosphate
  modified_base 19: mod_base = OTHER; note = 2'-O-methyluridine-3'-phosphate
  modified_base 20: mod_base = OTHER; note = 2'-O-methyluridine-3'-phosphate
  modified_base 21: mod_base = OTHER; note = 2'-O-methylguanosine-3'-phosphorothioate
  modified_base 22: mod_base = OTHER; note = 2'-O-methylcytidine-3'-phosphorothioate
  modified_base 23: mod_base = OTHER; note = 2'-O-methyluridine
tgcacaaagttgttctggttgct

SEQ ID NO: 599 - RNA, 23 nt, synthetic construct
  source 1..23: mol_type = other RNA
agcaaccagaacaactttgtgca

SEQ ID NO: 600 - RNA, 21 nt, synthetic construct
  source 1..21: mol_type = other RNA
  modified_base 1: mod_base = OTHER; note = 2'-O-methyluridine-3'-phosphorothioate
  modified_base 2: mod_base = OTHER; note = 2'-O-methyluridine-3'-phosphorothioate
  modified_base 3: mod_base = OTHER; note = 2'-O-methylcytidine-3'-phosphate
  modified_base 4: mod_base = OTHER; note = 2'-O-methyladenosine-3'-phosphate
  modified_base 5: mod_base = OTHER; note = 2'-O-methyluridine-3'-phosphate
  modified_base 6: mod_base = OTHER; note = 2'-O-hexadecyl-adenosine-3'-phosphate
  modified_base 7: mod_base = OTHER; note = 2'-deoxy-2'-fluoroguanosine-3'-phosphate
  modified_base 8: mod_base = OTHER; note = 2'-O-methyluridine-3'-phosphate
  modified_base 9: mod_base = OTHER; note = 2'-deoxy-2'-fluorouridine-3'-phosphate
  modified_base 10: mod_base = OTHER; note = 2'-deoxy-2'-fluorouridine-3'-phosphate
  modified_base 11: mod_base = OTHER; note = 2'-deoxy-2'-fluorocytidine-3'-phosphate
  modified_base 12: mod_base = OTHER; note = 2'-O-methyluridine-3'-phosphate
  modified_base 13: mod_base = OTHER; note = 2'-O-methylguanosine-3'-phosphate
  modified_base 14: mod_base = OTHER; note = 2'-O-methyluridine-3'-phosphate
  modified_base 15: mod_base = OTHER; note = 2'-O-methyladenosine-3'-phosphate
  modified_base 16: mod_base = OTHER; note = 2'-O-methyladenosine-3'-phosphate
  modified_base 17: mod_base = OTHER; note = 2'-O-methyluridine-3'-phosphate
  modified_base 18: mod_base = OTHER; note = 2'-O-methyluridine-3'-phosphate
  modified_base 19: mod_base = OTHER; note = 2'-O-methylguanosine-3'-phosphorothioate
  modified_base 20: mod_base = OTHER; note = 2'-O-methylguanosine-3'-phosphorothioate
  modified_base 21: mod_base = OTHER; note = 2'-O-methyladenosine
ttcatagtttctgtaattgga

SEQ ID NO: 601 - RNA, 23 nt, synthetic construct
  source 1..23: mol_type = other RNA
  modified_base 1: mod_base = OTHER; note = 2'-O-methyluridine-3'-phosphorothioate 5'-(E)-Vinylphosphonate
  modified_base 2: mod_base = OTHER; note = 2'-deoxy-2'-fluorocytidine-3'-phosphorothioate
  modified_base 3: mod_base = OTHER; note = 2'-O-methylcytidine-3'-phosphate
  modified_base 4: mod_base = OTHER; note = 2'-O-methyladenosine-3'-phosphate
  modified_base 5: mod_base = OTHER; note = 2'-O-methyladenosine-3'-phosphate
  modified_base 6: mod_base = OTHER; note = 2'-deoxy-2'-fluorouridine-3'-phosphate
  modified_base 7: mod_base = OTHER; note = 2'-O-methyluridine-3'-phosphate
  modified_base 8: mod_base = OTHER; note = 2'-deoxy-2'-fluoroadenosine-3'-phosphate
  modified_base 9: mod_base = OTHER; note = 2'-deoxy-2'-fluorocytidine-3'-phosphate
  modified_base 10: mod_base = OTHER; note = 2'-O-methyladenosine-3'-phosphate
  modified_base 11: mod_base = OTHER; note = 2'-O-methylguanosine-3'-phosphate
  modified_base 12: mod_base = OTHER; note = 2'-O-methyladenosine-3'-phosphate
  modified_base 13: mod_base = OTHER; note = 2'-O-methyladenosine-3'-phosphate
  modified_base 14: mod_base = OTHER; note = 2'-deoxy-2'-fluoroadenosine-3'-phosphate
  modified_base 15: mod_base = OTHER; note = 2'-O-methylcytidine-3'-phosphate
  modified_base 16: mod_base = OTHER; note = 2'-deoxy-2'-fluorouridine-3'-phosphate
  modified_base 17: mod_base = OTHER; note = 2'-O-methyladenosine-3'-phosphate
  modified_base 18: mod_base = OTHER; note = 2'-O-methyluridine-3'-phosphate
  modified_base 19: mod_base = OTHER; note = 2'-O-methylguanosine-3'-phosphate
  modified_base 20: mod_base = OTHER; note = 2'-O-methyladenosine-3'-phosphate
  modified_base 21: mod_base = OTHER; note = 2'-O-methyladenosine-3'-phosphorothioate
  modified_base 22: mod_base = OTHER; note = 2'-O-methylcytidine-3'-phosphorothioate
  modified_base 23: mod_base = OTHER; note = 2'-O-methyluridine
tccaattacagaaactatgaact

SEQ ID NO: 602 - RNA, 23 nt, synthetic construct
  source 1..23: mol_type = other RNA
agttcatagtttctgtaattggc

SEQ ID NO: 603 - RNA, 21 nt, synthetic construct
  source 1..21: mol_type = other RNA
  modified_base 1: mod_base = OTHER; note = 2'-O-methylcytidine-3'-phosphorothioate
  modified_base 2: mod_base = OTHER; note = 2'-O-methyladenosine-3'-phosphorothioate
  modified_base 3: mod_base = OTHER; note = 2'-O-methyladenosine-3'-phosphate
  modified_base 4: mod_base = OTHER; note = 2'-O-methylcytidine-3'-phosphate
  modified_base 5: mod_base = OTHER; note = 2'-O-methylcytidine-3'-phosphate
  modified_base 6: mod_base = OTHER; note = 2'-O-hexadecyl-adenosine-3'-phosphate
  modified_base 7: mod_base = OTHER; note = 2'-deoxy-2'-fluoroadenosine-3'-phosphate
  modified_base 8: mod_base = OTHER; note = 2'-O-methylguanosine-3'-phosphate
  modified_base 9: mod_base = OTHER; note = 2'-deoxy-2'-fluorouridine-3'-phosphate
  modified_base 10: mod_base = OTHER; note = 2'-deoxy-2'-fluoroguanosine-3'-phosphate
  modified_base 11: mod_base = OTHER; note = 2'-deoxy-2'-fluorouridine-3'-phosphate
  modified_base 12: mod_base = OTHER; note = 2'-O-methyladenosine-3'-phosphate
  modified_base 13: mod_base = OTHER; note = 2'-O-methylcytidine-3'-phosphate
  modified_base 14: mod_base = OTHER; note = 2'-O-methyluridine-3'-phosphate
  modified_base 15: mod_base = OTHER; note = 2'-O-methyladenosine-3'-phosphate
  modified_base 16: mod_base = OTHER; note = 2'-O-methylcytidine-3'-phosphate
  modified_base 17: mod_base = OTHER; note = 2'-O-methyladenosine-3'-phosphate
  modified_base 18: mod_base = OTHER; note = 2'-O-methylguanosine-3'-phosphate
  modified_base 19: mod_base = OTHER; note = 2'-O-methylguanosine-3'-phosphorothioate
  modified_base 20: mod_base = OTHER; note = 2'-O-methylcytidine-3'-phosphorothioate
  modified_base 21: mod_base = OTHER; note = 2'-O-methyladenosine
caaccaagtgtactacaggca

SEQ ID NO: 604 - RNA, 23 nt, synthetic construct
  source 1..23: mol_type = other RNA
  modified_base 1: mod_base = OTHER; note = 2'-O-methyluridine-3'-phosphorothioate 5'-(E)-Vinylphosphonate
  modified_base 2: mod_base = OTHER; note = 2'-deoxy-2'-fluoroguanosine-3'-phosphorothioate
  modified_base 3: mod_base = OTHER; note = 2'-O-methylcytidine-3'-phosphate
  modified_base 4: mod_base = OTHER; note = 2'-O-methylcytidine-3'-phosphate
  modified_base 5: mod_base = OTHER; note = 2'-O-methyluridine-3'-phosphate
  modified_base 6: mod_base = OTHER; note = 2'-deoxy-2'-fluoroguanosine-3'-phosphate
  modified_base 7: mod_base = OTHER; note = 2'-O-methyluridine-3'-phosphate
  modified_base 8: mod_base = OTHER; note = 2'-deoxy-2'-fluoroadenosine-3'-phosphate
  modified_base 9: mod_base = OTHER; note = 2'-deoxy-2'-fluoroguanosine-3'-phosphate
  modified_base 10: mod_base = OTHER; note = 2'-O-methyluridine-3'-phosphate
  modified_base 11: mod_base = OTHER; note = 2'-O-methyladenosine-3'-phosphate
  modified_base 12: mod_base = OTHER; note = 2'-O-methylcytidine-3'-phosphate
  modified_base 13: mod_base = OTHER; note = 2'-O-methyladenosine-3'-phosphate
  modified_base 14: mod_base = OTHER; note = 2'-deoxy-2'-fluorocytidine-3'-phosphate
  modified_base 15: mod_base = OTHER; note = 2'-O-methyluridine-3'-phosphate
  modified_base 16: mod_base = OTHER; note = 2'-deoxy-2'-fluorouridine-3'-phosphate
  modified_base 17: mod_base = OTHER; note = 2'-O-methylguanosine-3'-phosphate
  modified_base 18: mod_base = OTHER; note = 2'-O-methylguanosine-3'-phosphate
  modified_base 19: mod_base = OTHER; note = 2'-O-methyluridine-3'-phosphate
  modified_base 20: mod_base = OTHER; note = 2'-O-methyluridine-3'-phosphate
  modified_base 21: mod_base = OTHER; note = 2'-O-methylguanosine-3'-phosphorothioate
  modified_base 22: mod_base = OTHER; note = 2'-O-methylguanosine-3'-phosphorothioate
  modified_base 23: mod_base = OTHER; note = 2'-O-methylguanosine
tgcctgtagtacacttggttggg

SEQ ID NO: 605 - RNA, 23 nt, synthetic construct
  source 1..23: mol_type = other RNA
cccaaccaagtgtactacaggcc

SEQ ID NO: 606 - RNA, 21 nt, synthetic construct
  source 1..21: mol_type = other RNA
  modified_base 1: mod_base = OTHER; note = 2'-O-methyladenosine-3'-phosphorothioate
  modified_base 2: mod_base = OTHER; note = 2'-O-methyladenosine-3'-phosphorothioate
  modified_base 3: mod_base = OTHER; note = 2'-O-methylguanosine-3'-phosphate
  modified_base 4: mod_base = OTHER; note = 2'-O-methylguanosine-3'-phosphate
  modified_base 5: mod_base = OTHER; note = 2'-O-methylcytidine-3'-phosphate
  modified_base 6: mod_base = OTHER; note = 2'-O-hexadecyl-adenosine-3'-phosphate
  modified_base 7: mod_base = OTHER; note = 2'-deoxy-2'-fluoroadenosine-3'-phosphate
  modified_base 8: mod_base = OTHER; note = 2'-O-methyladenosine-3'-phosphate
  modified_base 9: mod_base = OTHER; note = 2'-deoxy-2'-fluorouridine-3'-phosphate
  modified_base 10: mod_base = OTHER; note = 2'-deoxy-2'-fluorocytidine-3'-phosphate
  modified_base 11: mod_base = OTHER; note = 2'-deoxy-2'-fluorouridine-3'-phosphate
  modified_base 12: mod_base = OTHER; note = 2'-O-methylcytidine-3'-phosphate
  modified_base 13: mod_base = OTHER; note = 2'-O-methylcytidine-3'-phosphate
  modified_base 14: mod_base = OTHER; note = 2'-O-methyluridine-3'-phosphate
  modified_base 15: mod_base = OTHER; note = 2'-O-methyluridine-3'-phosphate
  modified_base 16: mod_base = OTHER; note = 2'-O-methyluridine-3'-phosphate
  modified_base 17: mod_base = OTHER; note = 2'-O-methylguanosine-3'-phosphate
  modified_base 18: mod_base = OTHER; note = 2'-O-methyluridine-3'-phosphate
  modified_base 19: mod_base = OTHER; note = 2'-O-methylcytidine-3'-phosphorothioate
  modified_base 20: mod_base = OTHER; note = 2'-O-methylcytidine-3'-phosphorothioate
  modified_base 21: mod_base = OTHER; note = 2'-O-methyladenosine
aaggcaaatctcctttgtcca

SEQ ID NO: 607 - RNA, 23 nt, synthetic construct
  source 1..23: mol_type = other RNA
  modified_base 1: mod_base = OTHER; note = 2'-O-methyluridine-3'-phosphorothioate 5'-(E)-Vinylphosphonate
  modified_base 2: mod_base = OTHER; note = 2'-deoxy-2'-fluoroguanosine-3'-phosphorothioate
  modified_base 3: mod_base = OTHER; note = 2'-O-methylguanosine-3'-phosphate
  modified_base 4: mod_base = OTHER; note = 2'-O-methyladenosine-3'-phosphate
  modified_base 5: mod_base = OTHER; note = 2'-O-methylcytidine-3'-phosphate
  modified_base 6: mod_base = OTHER; note = 2'-deoxy-2'-fluoroadenosine-3'-phosphate
  modified_base 7: mod_base = OTHER; note = 2'-O-methyladenosine-3'-phosphate
  modified_base 8: mod_base = OTHER; note = 2'-deoxy-2'-fluoroadenosine-3'-phosphate
  modified_base 9: mod_base = OTHER; note = 2'-deoxy-2'-fluoroguanosine-3'-phosphate
  modified_base 10: mod_base = OTHER; note = 2'-O-methylguanosine-3'-phosphate
  modified_base 11: mod_base = OTHER; note = 2'-O-methyladenosine-3'-phosphate
  modified_base 12: mod_base = OTHER; note = 2'-O-methylguanosine-3'-phosphate
  modified_base 13: mod_base = OTHER; note = 2'-O-methyladenosine-3'-phosphate
  modified_base 14: mod_base = OTHER; note = 2'-deoxy-2'-fluorouridine-3'-phosphate
  modified_base 15: mod_base = OTHER; note = 2'-O-methyluridine-3'-phosphate
  modified_base 16: mod_base = OTHER; note = 2'-deoxy-2'-fluorouridine-3'-phosphate
  modified_base 17: mod_base = OTHER; note = 2'-O-methylguanosine-3'-phosphate
  modified_base 18: mod_base = OTHER; note = 2'-O-methylcytidine-3'-phosphate
  modified_base 19: mod_base = OTHER; note = 2'-O-methylcytidine-3'-phosphate
  modified_base 20: mod_base = OTHER; note = 2'-O-methyluridine-3'-phosphate
  modified_base 21: mod_base = OTHER; note = 2'-O-methyluridine-3'-phosphorothioate
  modified_base 22: mod_base = OTHER; note = 2'-O-methylcytidine-3'-phosphorothioate
  modified_base 23: mod_base = OTHER; note = 2'-O-methyladenosine
tggacaaaggagatttgccttca

SEQ ID NO: 608 - RNA, 23 nt, synthetic construct
  source 1..23: mol_type = other RNA
tgaaggcaaatctcctttgtcca

SEQ ID NO: 609 - RNA, 21 nt, synthetic construct
  source 1..21: mol_type = other RNA
  modified_base 1: mod_base = OTHER; note = 2'-O-methyladenosine-3'-phosphorothioate
  modified_base 2: mod_base = OTHER; note = 2'-O-methyladenosine-3'-phosphorothioate
  modified_base 3: mod_base = OTHER; note = 2'-O-methylguanosine-3'-phosphate
  modified_base 4: mod_base = OTHER; note = 2'-O-methyladenosine-3'-phosphate
  modified_base 5: mod_base = OTHER; note = 2'-O-methyluridine-3'-phosphate
  modified_base 6: mod_base = OTHER; note = 2'-O-hexadecyl-guanosine-3'-phosphate
  modified_base 7: mod_base = OTHER; note = 2'-deoxy-2'-fluoroadenosine-3'-phosphate
  modified_base 8: mod_base = OTHER; note = 2'-O-methyluridine-3'-phosphate
  modified_base 9: mod_base = OTHER; note = 2'-deoxy-2'-fluoroguanosine-3'-phosphate
  modified_base 10: mod_base = OTHER; note = 2'-deoxy-2'-fluoroguanosine-3'-phosphate
  modified_base 11: mod_base = OTHER; note = 2'-deoxy-2'-fluoroadenosine-3'-phosphate
  modified_base 12: mod_base = OTHER; note = 2'-O-methylguanosine-3'-phosphate
  modified_base 13: mod_base = OTHER; note = 2'-O-methylcytidine-3'-phosphate
  modified_base 14: mod_base = OTHER; note = 2'-O-methylguanosine-3'-phosphate
  modified_base 15: mod_base = OTHER; note = 2'-O-methylcytidine-3'-phosphate
  modified_base 16: mod_base = OTHER; note = 2'-O-methylguanosine-3'-phosphate
  modified_base 17: mod_base = OTHER; note = 2'-O-methyluridine-3'-phosphate
  modified_base 18: mod_base = OTHER; note = 2'-O-methylguanosine-3'-phosphate
  modified_base 19: mod_base = OTHER; note = 2'-O-methylguanosine-3'-phosphorothioate
  modified_base 20: mod_base = OTHER; note = 2'-O-methyluridine-3'-phosphorothioate
  modified_base 21: mod_base = OTHER; note = 2'-O-methyladenosine
aagatgatggagcgcgtggta

SEQ ID NO: 610 - RNA, 23 nt, synthetic construct
  source 1..23: mol_type = other RNA
  modified_base 1: mod_base = OTHER; note = 2'-O-methyluridine-3'-phosphorothioate 5'-(E)-Vinylphosphonate
  modified_base 2: mod_base = OTHER; note = 2'-deoxy-2'-fluoroadenosine-3'-phosphorothioate
  modified_base 3: mod_base = OTHER; note = 2'-O-methylcytidine-3'-phosphate
  modified_base 4: mod_base = OTHER; note = 2'-O-methylcytidine-3'-phosphate
  modified_base 5: mod_base = OTHER; note = 2'-O-methyladenosine-3'-phosphate
  modified_base 6: mod_base = OTHER; note = 2'-deoxy-2'-fluorocytidine-3'-phosphate
  modified_base 7: mod_base = OTHER; note = 2'-O-methylguanosine-3'-phosphate
  modified_base 8: mod_base = OTHER; note = 2'-deoxy-2'-fluorocytidine-3'-phosphate
  modified_base 9: mod_base = OTHER; note = 2'-deoxy-2'-fluoroguanosine-3'-phosphate
  modified_base 10: mod_base = OTHER; note = 2'-O-methylcytidine-3'-phosphate
  modified_base 11: mod_base = OTHER; note = 2'-O-methyluridine-3'-phosphate
  modified_base 12: mod_base = OTHER; note = 2'-O-methylcytidine-3'-phosphate
  modified_base 13: mod_base = OTHER; note = 2'-O-methylcytidine-3'-phosphate
  modified_base 14: mod_base = OTHER; note = 2'-deoxy-2'-fluoroadenosine-3'-phosphate
  modified_base 15: mod_base = OTHER; note = 2'-O-methyluridine-3'-phosphate
  modified_base 16: mod_base = OTHER; note = 2'-deoxy-2'-fluorocytidine-3'-phosphate
  modified_base 17: mod_base = OTHER; note = 2'-O-methyladenosine-3'-phosphate
  modified_base 18: mod_base = OTHER; note = 2'-O-methyluridine-3'-phosphate
  modified_base 19: mod_base = OTHER; note = 2'-O-methylcytidine-3'-phosphate
  modified_base 20: mod_base = OTHER; note = 2'-O-methyluridine-3'-phosphate
  modified_base 21: mod_base = OTHER; note = 2'-O-methyluridine-3'-phosphorothioate
  modified_base 22: mod_base = OTHER; note = 2'-O-methyladenosine-3'-phosphorothioate
  modified_base 23: mod_base = OTHER; note = 2'-O-methyladenosine
taccacgcgctccatcatcttaa

SEQ ID NO: 611 - RNA, 23 nt, synthetic construct
  source 1..23: mol_type = other RNA
ttaagatgatggagcgcgtggtt

SEQ ID NO: 612 - RNA, 21 nt, synthetic construct
  source 1..21: mol_type = other RNA
  modified_base 1: mod_base = OTHER; note = 2'-O-methyladenosine-3'-phosphorothioate
  modified_base 2: mod_base = OTHER; note = 2'-O-methyluridine-3'-phosphorothioate
  modified_base 3: mod_base = OTHER; note = 2'-O-methylcytidine-3'-phosphate
  modified_base 4: mod_base = OTHER; note = 2'-O-methyladenosine-3'-phosphate
  modified_base 5: mod_base = OTHER; note = 2'-O-methyladenosine-3'-phosphate
  modified_base 6: mod_base = OTHER; note = 2'-O-hexadecyl-guanosine-3'-phosphate
  modified_base 7: mod_base = OTHER; note = 2'-deoxy-2'-fluorocytidine-3'-phosphate
  modified_base 8: mod_base = OTHER; note = 2'-O-methyladenosine-3'-phosphate
  modified_base 9: mod_base = OTHER; note = 2'-deoxy-2'-fluoroguanosine-3'-phosphate
  modified_base 10: mod_base = OTHER; note = 2'-deoxy-2'-fluorocytidine-3'-phosphate
  modified_base 11: mod_base = OTHER; note = 2'-deoxy-2'-fluoroadenosine-3'-phosphate
  modified_base 12: mod_base = OTHER; note = 2'-O-methylcytidine-3'-phosphate
  modified_base 13: mod_base = OTHER; note = 2'-O-methyladenosine-3'-phosphate
  modified_base 14: mod_base = OTHER; note = 2'-O-methylcytidine-3'-phosphate
  modified_base 15: mod_base = OTHER; note = 2'-O-methylguanosine-3'-phosphate
  modified_base 16: mod_base = OTHER; note = 2'-O-methylguanosine-3'-phosphate
  modified_base 17: mod_base = OTHER; note = 2'-O-methyluridine-3'-phosphate
  modified_base 18: mod_base = OTHER; note = 2'-O-methylcytidine-3'-phosphate
  modified_base 19: mod_base = OTHER; note = 2'-O-methyladenosine-3'-phosphorothioate
  modified_base 20: mod_base = OTHER; note = 2'-O-methylcytidine-3'-phosphorothioate
  modified_base 21: mod_base = OTHER; note = 2'-O-methyladenosine
atcaagcagcacacggtcaca

SEQ ID NO: 613 - RNA, 23 nt, synthetic construct
  source 1..23: mol_type = other RNA
  modified_base 1: mod_base = OTHER; note = 2'-O-methyluridine-3'-phosphorothioate 5'-(E)-Vinylphosphonate
  modified_base 2: mod_base = OTHER; note = 2'-deoxy-2'-fluoroguanosine-3'-phosphorothioate
  modified_base 3: mod_base = OTHER; note = 2'-O-methyluridine-3'-phosphate
  modified_base 4: mod_base = OTHER; note = 2'-O-methylguanosine-3'-phosphate
  modified_base 5: mod_base = OTHER; note = 2'-O-methyladenosine-3'-phosphate
  modified_base 6: mod_base = OTHER; note = 2'-deoxy-2'-fluorocytidine-3'-phosphate
  modified_base 7: mod_base = OTHER; note = 2'-O-methylcytidine-3'-phosphate
  modified_base 8: mod_base = OTHER; note = 2'-deoxy-2'-fluoroguanosine-3'-phosphate
  modified_base 9: mod_base = OTHER; note = 2'-deoxy-2'-fluorouridine-3'-phosphate
  modified_base 10: mod_base = OTHER; note = 2'-O-methylguanosine-3'-phosphate
  modified_base 11: mod_base = OTHER; note = 2'-O-methyluridine-3'-phosphate
  modified_base 12: mod_base = OTHER; note = 2'-O-methylguanosine-3'-phosphate
  modified_base 13: mod_base = OTHER; note = 2'-O-methylcytidine-3'-phosphate
  modified_base 14: mod_base = OTHER; note = 2'-deoxy-2'-fluorouridine-3'-phosphate
  modified_base 15: mod_base = OTHER; note = 2'-O-methylguanosine-3'-phosphate
  modified_base 16: mod_base = OTHER; note = 2'-deoxy-2'-fluorocytidine-3'-phosphate
  modified_base 17: mod_base = OTHER; note = 2'-O-methyluridine-3'-phosphate
  modified_base 18: mod_base = OTHER; note = 2'-O-methyluridine-3'-phosphate
  modified_base 19: mod_base = OTHER; note = 2'-O-methylguanosine-3'-phosphate
  modified_base 20: mod_base = OTHER; note = 2'-O-methyladenosine-3'-phosphate
  modified_base 21: mod_base = OTHER; note = 2'-O-methyluridine-3'-phosphorothioate
  modified_base 22: mod_base = OTHER; note = 2'-O-methyluridine-3'-phosphorothioate
  modified_base 23: mod_base = OTHER; note = 2'-O-methylguanosine
tgtgaccgtgtgctgcttgattg

SEQ ID NO: 614 - RNA, 23 nt, synthetic construct
  source 1..23: mol_type = other RNA
caatcaagcagcacacggtcacc

SEQ ID NO: 615 - RNA, 21 nt, synthetic construct
  source 1..21: mol_type = other RNA
  modified_base 1: mod_base = OTHER; note = 2'-O-methyluridine-3'-phosphorothioate
  modified_base 2: mod_base = OTHER; note = 2'-O-methylcytidine-3'-phosphorothioate
  modified_base 3: mod_base = OTHER; note = 2'-O-methyladenosine-3'-phosphate
  modified_base 4: mod_base = OTHER; note = 2'-O-methyladenosine-3'-phosphate
  modified_base 5: mod_base = OTHER; note = 2'-O-methylguanosine-3'-phosphate
  modified_base 6: mod_base = OTHER; note = 2'-O-hexadecyl-cytidine-3'-phosphate
  modified_base 7: mod_base = OTHER; note = 2'-deoxy-2'-fluoroadenosine-3'-phosphate
  modified_base 8: mod_base = OTHER; note = 2'-O-methylguanosine-3'-phosphate
  modified_base 9: mod_base = OTHER; note = 2'-deoxy-2'-fluorocytidine-3'-phosphate
  modified_base 10: mod_base = OTHER; note = 2'-deoxy-2'-fluoroadenosine-3'-phosphate
  modified_base 11: mod_base = OTHER; note = 2'-deoxy-2'-fluorocytidine-3'-phosphate
  modified_base 12: mod_base = OTHER; note = 2'-O-methyladenosine-3'-phosphate
  modified_base 13: mod_base = OTHER; note = 2'-O-methylcytidine-3'-phosphate
  modified_base 14: mod_base = OTHER; note = 2'-O-methylguanosine-3'-phosphate
  modified_base 15: mod_base = OTHER; note = 2'-O-methylguanosine-3'-phosphate
  modified_base 16: mod_base = OTHER; note = 2'-O-methyluridine-3'-phosphate
  modified_base 17: mod_base = OTHER; note = 2'-O-methylcytidine-3'-phosphate
  modified_base 18: mod_base = OTHER; note = 2'-O-methyladenosine-3'-phosphate
  modified_base 19: mod_base = OTHER; note = 2'-O-methylcytidine-3'-phosphorothioate
  modified_base 20: mod_base = OTHER; note = 2'-O-methylcytidine-3'-phosphorothioate
  modified_base 21: mod_base = OTHER; note = 2'-O-methyladenosine
tcaagcagcacacggtcacca

SEQ ID NO: 616 - RNA, 23 nt, synthetic construct
  source 1..23: mol_type = other RNA
  modified_base 1: mod_base = OTHER; note = 2'-O-methyluridine-3'-phosphorothioate 5'-(E)-Vinylphosphonate
  modified_base 2: mod_base = OTHER; note = 2'-deoxy-2'-fluoroguanosine-3'-phosphorothioate
  modified_base 3: mod_base = OTHER; note = 2'-O-methylguanosine-3'-phosphate
  modified_base 4: mod_base = OTHER; note = 2'-O-methyluridine-3'-phosphate
  modified_base 5: mod_base = OTHER; note = 2'-O-methylguanosine-3'-phosphate
  modified_base 6: mod_base = OTHER; note = 2'-deoxy-2'-fluoroadenosine-3'-phosphate
  modified_base 7: mod_base = OTHER; note = 2'-O-methylcytidine-3'-phosphate
  modified_base 8: mod_base = OTHER; note = 2'-deoxy-2'-fluorocytidine-3'-phosphate
  modified_base 9: mod_base = OTHER; note = 2'-deoxy-2'-fluoroguanosine-3'-phosphate
  modified_base 10: mod_base = OTHER; note = 2'-O-methyluridine-3'-phosphate
  modified_base 11: mod_base = OTHER; note = 2'-O-methylguanosine-3'-phosphate
  modified_base 12: mod_base = OTHER; note = 2'-O-methyluridine-3'-phosphate
  modified_base 13: mod_base = OTHER; note = 2'-O-methylguanosine-3'-phosphate
  modified_base 14: mod_base = OTHER; note = 2'-deoxy-2'-fluorocytidine-3'-phosphate
  modified_base 15: mod_base = OTHER; note = 2'-O-methyluridine-3'-phosphate
  modified_base 16: mod_base = OTHER; note = 2'-deoxy-2'-fluoroguanosine-3'-phosphate
  modified_base 17: mod_base = OTHER; note = 2'-O-methylcytidine-3'-phosphate
  modified_base 18: mod_base = OTHER; note = 2'-O-methyluridine-3'-phosphate
  modified_base 19: mod_base = OTHER; note = 2'-O-methyluridine-3'-phosphate
  modified_base 20: mod_base = OTHER; note = 2'-O-methylguanosine-3'-phosphate
  modified_base 21: mod_base = OTHER; note = 2'-O-methyladenosine-3'-phosphorothioate
  modified_base 22: mod_base = OTHER; note = 2'-O-methyluridine-3'-phosphorothioate
  modified_base 23: mod_base = OTHER; note = 2'-O-methyluridine
tggtgaccgtgtgctgcttgatt

SEQ ID NO: 617 - RNA, 23 nt, synthetic construct
  source 1..23: mol_type = other RNA
aatcaagcagcacacggtcacca

SEQ ID NO: 618 - RNA, 21 nt, synthetic construct
  source 1..21: mol_type = other RNA
  modified_base 1: mod_base = OTHER; note = 2'-O-methylguanosine-3'-phosphorothioate
  modified_base 2: mod_base = OTHER; note = 2'-O-methyladenosine-3'-phosphorothioate
  modified_base 3: mod_base = OTHER; note = 2'-O-methylguanosine-3'-phosphate
  modified_base 4: mod_base = OTHER; note = 2'-O-methyluridine-3'-phosphate
  modified_base 5: mod_base = OTHER; note = 2'-O-methyladenosine-3'-phosphate
  modified_base 6: mod_base = OTHER; note = 2'-O-hexadecyl-cytidine-3'-phosphate
  modified_base 7: mod_base = OTHER; note = 2'-deoxy-2'-fluoroadenosine-3'-phosphate
  modified_base 8: mod_base = OTHER; note = 2'-O-methylguanosine-3'-phosphate
  modified_base 9: mod_base = OTHER; note = 2'-deoxy-2'-fluorocytidine-3'-phosphate
  modified_base 10: mod_base = OTHER; note = 2'-deoxy-2'-fluoroadenosine-3'-phosphate
  modified_base 11: mod_base = OTHER; note = 2'-deoxy-2'-fluoroadenosine-3'-phosphate
  modified_base 12: mod_base = OTHER; note = 2'-O-methylcytidine-3'-phosphate
  modified_base 13: mod_base = OTHER; note = 2'-O-methylcytidine-3'-phosphate
  modified_base 14: mod_base = OTHER; note = 2'-O-methyladenosine-3'-phosphate
  modified_base 15: mod_base = OTHER; note = 2'-O-methylguanosine-3'-phosphate
  modified_base 16: mod_base = OTHER; note = 2'-O-methyladenosine-3'-phosphate
  modified_base 17: mod_base = OTHER; note = 2'-O-methyladenosine-3'-phosphate
  modified_base 18: mod_base = OTHER; note = 2'-O-methylcytidine-3'-phosphate
  modified_base 19: mod_base = OTHER; note = 2'-O-methyladenosine-3'-phosphorothioate
  modified_base 20: mod_base = OTHER; note = 2'-O-methyladenosine-3'-phosphorothioate
  modified_base 21: mod_base = OTHER; note = 2'-O-methyladenosine
gagtacagcaaccagaacaaa

SEQ ID NO: 619 - RNA, 23 nt, synthetic construct
  source 1..23: mol_type = other RNA
  modified_base 1: mod_base = OTHER; note = 2'-O-methyluridine-3'-phosphorothioate 5'-(E)-Vinylphosphonate
  modified_base 2: mod_base = OTHER; note = 2'-deoxy-2'-fluorouridine-3'-phosphorothioate
  modified_base 3: mod_base = OTHER; note = 2'-O-methyluridine-3'-phosphate
  modified_base 4: mod_base = OTHER; note = 2'-O-methylguanosine-3'-phosphate
  modified_base 5: mod_base = OTHER; note = 2'-O-methyluridine-3'-phosphate
  modified_base 6: mod_base = OTHER; note = 2'-deoxy-2'-fluorouridine-3'-phosphate
  modified_base 7: mod_base = OTHER; note = 2'-O-methylcytidine-3'-phosphate
  modified_base 8: mod_base = OTHER; note = 2'-deoxy-2'-fluorouridine-3'-phosphate
  modified_base 9: mod_base = OTHER; note = 2'-deoxy-2'-fluoroguanosine-3'-phosphate
  modified_base 10: mod_base = OTHER; note = 2'-O-methylguanosine-3'-phosphate
  modified_base 11: mod_base = OTHER; note = 2'-O-methyluridine-3'-phosphate
  modified_base 12: mod_base = OTHER; note = 2'-O-methyluridine-3'-phosphate
  modified_base 13: mod_base = OTHER; note = 2'-O-methylguanosine-3'-phosphate
  modified_base 14: mod_base = OTHER; note = 2'-deoxy-2'-fluorocytidine-3'-phosphate
  modified_base 15: mod_base = OTHER; note = 2'-O-methyluridine-3'-phosphate
  modified_base 16: mod_base = OTHER; note = 2'-deoxy-2'-fluoroguanosine-3'-phosphate
  modified_base 17: mod_base = OTHER; note = 2'-O-methyluridine-3'-phosphate
  modified_base 18: mod_base = OTHER; note = 2'-O-methyladenosine-3'-phosphate
  modified_base 19: mod_base = OTHER; note = 2'-O-methylcytidine-3'-phosphate
  modified_base 20: mod_base = OTHER; note = 2'-O-methyluridine-3'-phosphate
  modified_base 21: mod_base = OTHER; note = 2'-O-methylcytidine-3'-phosphorothioate
  modified_base 22: mod_base = OTHER; note = 2'-O-methyladenosine-3'-phosphorothioate
  modified_base 23: mod_base = OTHER; note = 2'-O-methyluridine
tttgttctggttgctgtactcat

SEQ ID NO: 620 - RNA, 23 nt, synthetic construct
  source 1..23: mol_type = other RNA
atgagtacagcaaccagaacaac

SEQ ID NO: 621 - RNA, 21 nt, synthetic construct
  source 1..21: mol_type = other RNA
  modified_base 1: mod_base = OTHER; note = 2'-O-methyladenosine-3'-phosphorothioate
  modified_base 2: mod_base = OTHER; note = 2'-O-methyladenosine-3'-phosphorothioate
  modified_base 3: mod_base = OTHER; note = 2'-O-methyladenosine-3'-phosphate
  modified_base 4: mod_base = OTHER; note = 2'-O-methyluridine-3'-phosphate
  modified_base 5: mod_base = OTHER; note = 2'-O-methyladenosine-3'-phosphate
  modified_base 6: mod_base = OTHER; note = 2'-O-hexadecyl-adenosine-3'-phosphate
  modified_base 7: mod_base = OTHER; note = 2'-deoxy-2'-fluorocytidine-3'-phosphate
  modified_base 8: mod_base = OTHER; note = 2'-O-methylcytidine-3'-phosphate
  modified_base 9: mod_base = OTHER; note = 2'-deoxy-2'-fluoroadenosine-3'-phosphate
  modified_base 10: mod_base = OTHER; note = 2'-deoxy-2'-fluorouridine-3'-phosphate
  modified_base 11: mod_base = OTHER; note = 2'-deoxy-2'-fluorouridine-3'-phosphate
  modified_base 12: mod_base = OTHER; note = 2'-O-methylguanosine-3'-phosphate
  modified_base 13: mod_base = OTHER; note = 2'-O-methylguanosine-3'-phosphate
  modified_base 14: mod_base = OTHER; note = 2'-O-methyluridine-3'-phosphate
  modified_base 15: mod_base = OTHER; note = 2'-O-methyluridine-3'-phosphate
  modified_base 16: mod_base = OTHER; note = 2'-O-methyladenosine-3'-phosphate
  modified_base 17: mod_base = OTHER; note = 2'-O-methyladenosine-3'-phosphate
  modified_base 18: mod_base = OTHER; note = 2'-O-methyluridine-3'-phosphate
  modified_base 19: mod_base = OTHER; note = 2'-O-methylcytidine-3'-phosphorothioate
  modified_base 20: mod_base = OTHER; note = 2'-O-methyluridine-3'-phosphorothioate
  modified_base 21: mod_base = OTHER; note = 2'-O-methyladenosine
aaataaccattggttaatcta

SEQ ID NO: 622 - RNA, 23 nt, synthetic construct
  source 1..23: mol_type = other RNA
  modified_base 1: mod_base = OTHER; note = 2'-O-methyluridine-3'-phosphorothioate 5'-(E)-Vinylphosphonate
  modified_base 2: mod_base = OTHER; note = 2'-deoxy-2'-fluoroadenosine-3'-phosphorothioate
  modified_base 3: mod_base = OTHER; note = 2'-O-methylguanosine-3'-phosphate
  modified_base 4: mod_base = OTHER; note = 2'-O-methyladenosine-3'-phosphate
  modified_base 5: mod_base = OTHER; note = 2'-O-methyluridine-3'-phosphate
  modified_base 6: mod_base = OTHER; note = 2'-deoxy-2'-fluorouridine-3'-phosphate
  modified_base 7: mod_base = OTHER; note = 2'-O-methyladenosine-3'-phosphate
  modified_base 8: mod_base = OTHER; note = 2'-deoxy-2'-fluoroadenosine-3'-phosphate
  modified_base 9: mod_base = OTHER; note = 2'-deoxy-2'-fluorocytidine-3'-phosphate
  modified_base 10: mod_base = OTHER; note = 2'-O-methylcytidine-3'-phosphate
  modified_base 11: mod_base = OTHER; note = 2'-O-methyladenosine-3'-phosphate
  modified_base 12: mod_base = OTHER; note = 2'-O-methyladenosine-3'-phosphate
  modified_base 13: mod_base = OTHER; note = 2'-O-methyluridine-3'-phosphate
  modified_base 14: mod_base = OTHER; note = 2'-deoxy-2'-fluoroguanosine-3'-phosphate
  modified_base 15: mod_base = OTHER; note = 2'-O-methylguanosine-3'-phosphate
  modified_base 16: mod_base = OTHER; note = 2'-deoxy-2'-fluorouridine-3'-phosphate
  modified_base 17: mod_base = OTHER; note = 2'-O-methyluridine-3'-phosphate
  modified_base 18: mod_base = OTHER; note = 2'-O-methyladenosine-3'-phosphate
  modified_base 19: mod_base = OTHER; note = 2'-O-methyluridine-3'-phosphate
  modified_base 20: mod_base = OTHER; note = 2'-O-methyluridine-3'-phosphate
  modified_base 21: mod_base = OTHER; note = 2'-O-methyluridine-3'-phosphorothioate
  modified_base 22: mod_base = OTHER; note = 2'-O-methylguanosine-3'-phosphorothioate
  modified_base 23: mod_base = OTHER; note = 2'-O-methylcytidine
tagattaaccaatggttatttgc

SEQ ID NO: 623 - RNA, 23 nt, synthetic construct
  source 1..23: mol_type = other RNA
gcaaataaccattggttaatctg

SEQ ID NO: 624 - RNA, 21 nt, synthetic construct
  source 1..21: mol_type = other RNA
  modified_base 1: mod_base = OTHER; note = 2'-O-methyladenosine-3'-phosphorothioate
  modified_base 2: mod_base = OTHER; note = 2'-O-methylguanosine-3'-phosphorothioate
  modified_base 3: mod_base = OTHER; note = 2'-O-methyluridine-3'-phosphate
  modified_base 4: mod_base = OTHER; note = 2'-O-methyladenosine-3'-phosphate
  modified_base 5: mod_base = OTHER; note = 2'-O-methylcytidine-3'-phosphate
  modified_base 6: mod_base = OTHER; note = 2'-O-hexadecyl-adenosine-3'-phosphate
  modified_base 7: mod_base = OTHER; note = 2'-deoxy-2'-fluoroguanosine-3'-phosphate
  modified_base 8: mod_base = OTHER; note = 2'-O-methylcytidine-3'-phosphate
  modified_base 9: mod_base = OTHER; note = 2'-deoxy-2'-fluoroadenosine-3'-phosphate
  modified_base 10: mod_base = OTHER; note = 2'-deoxy-2'-fluoroadenosine-3'-phosphate
  modified_base 11: mod_base = OTHER; note = 2'-deoxy-2'-fluorocytidine-3'-phosphate
  modified_base 12: mod_base = OTHER; note = 2'-O-methylcytidine-3'-phosphate
  modified_base 13: mod_base = OTHER; note = 2'-O-methyladenosine-3'-phosphate
  modified_base 14: mod_base = OTHER; note = 2'-O-methylguanosine-3'-phosphate
  modified_base 15: mod_base = OTHER; note = 2'-O-methyladenosine-3'-phosphate
  modified_base 16: mod_base = OTHER; note = 2'-O-methyladenosine-3'-phosphate
  modified_base 17: mod_base = OTHER; note = 2'-O-methylcytidine-3'-phosphate
  modified_base 18: mod_base = OTHER; note = 2'-O-methyladenosine-3'-phosphate
  modified_base 19: mod_base = OTHER; note = 2'-O-methyladenosine-3'-phosphorothioate
  modified_base 20: mod_base = OTHER; note = 2'-O-methylcytidine-3'-phosphorothioate
  modified_base 21: mod_base = OTHER; note = 2'-O-methyladenosine
agtacagcaaccagaacaaca

SEQ ID NO: 625 - RNA, 23 nt, synthetic construct
  source 1..23: mol_type = other RNA
  modified_base 1: mod_base = OTHER; note = 2'-O-methyluridine-3'-phosphorothioate 5'-(E)-Vinylphosphonate
  modified_base 2: mod_base = OTHER; note = 2'-deoxy-2'-fluoroguanosine-3'-phosphorothioate
  modified_base 3: mod_base = OTHER; note = 2'-O-methyluridine-3'-phosphate
  modified_base 4: mod_base = OTHER; note = 2'-O-methyluridine-3'-phosphate
  modified_base 5: mod_base = OTHER; note = 2'-O-methylguanosine-3'-phosphate
  modified_base 6: mod_base = OTHER; note = 2'-deoxy-2'-fluorouridine-3'-phosphate
  modified_base 7: mod_base = OTHER; note = 2'-O-methyluridine-3'-phosphate
  modified_base 8: mod_base = OTHER; note = 2'-deoxy-2'-fluorocytidine-3'-phosphate
  modified_base 9: mod_base = OTHER; note = 2'-deoxy-2'-fluorouridine-3'-phosphate
  modified_base 10: mod_base = OTHER; note = 2'-O-methylguanosine-3'-phosphate
  modified_base 11: mod_base = OTHER; note = 2'-O-methylguanosine-3'-phosphate
  modified_base 12: mod_base = OTHER; note = 2'-O-methyluridine-3'-phosphate
  modified_base 13: mod_base = OTHER; note = 2'-O-methyluridine-3'-phosphate
  modified_base 14: mod_base = OTHER; note = 2'-deoxy-2'-fluoroguanosine-3'-phosphate
  modified_base 15: mod_base = OTHER; note = 2'-O-methylcytidine-3'-phosphate
  modified_base 16: mod_base = OTHER; note = 2'-deoxy-2'-fluorouridine-3'-phosphate
  modified_base 17: mod_base = OTHER; note = 2'-O-methylguanosine-3'-phosphate
  modified_base 18: mod_base = OTHER; note = 2'-O-methyluridine-3'-phosphate
  modified_base 19: mod_base = OTHER; note = 2'-O-methyladenosine-3'-phosphate
  modified_base 20: mod_base = OTHER; note = 2'-O-methylcytidine-3'-phosphate
  modified_base 21: mod_base = OTHER; note = 2'-O-methyluridine-3'-phosphorothioate
  modified_base 22: mod_base = OTHER; note = 2'-O-methylcytidine-3'-phosphorothioate
  modified_base 23: mod_base = OTHER; note = 2'-O-methyladenosine
tgttgttctggttgctgtactca

SEQ ID NO: 626 - RNA, 23 nt, synthetic construct
  source 1..23: mol_type = other RNA
tgagtacagcaaccagaacaact

SEQ ID NO: 627 - RNA, 21 nt, synthetic construct
  source 1..21: mol_type = other RNA
  modified_base 1: mod_base = OTHER; note = 2'-O-methylguanosine-3'-phosphorothioate
  modified_base 2: mod_base = OTHER; note = 2'-O-methylguanosine-3'-phosphorothioate
  modified_base 3: mod_base = OTHER; note = 2'-O-methylguanosine-3'-phosphate
  modified_base 4: mod_base = OTHER; note = 2'-O-methyladenosine-3'-phosphate
  modified_base 5: mod_base = OTHER; note = 2'-O-methylguanosine-3'-phosphate
  modified_base 6: mod_base = OTHER; note = 2'-O-hexadecyl-adenosine-3'-phosphate
  modified_base 7: mod_base = OTHER; note = 2'-deoxy-2'-fluoroadenosine-3'-phosphate
  modified_base 8: mod_base = OTHER; note = 2'-O-methylcytidine-3'-phosphate
  modified_base 9: mod_base = OTHER; note = 2'-deoxy-2'-fluorouridine-3'-phosphate
  modified_base 10: mod_base = OTHER; note = 2'-deoxy-2'-fluorouridine-3'-phosphate
  modified_base 11: mod_base = OTHER; note = 2'-deoxy-2'-fluorocytidine-3'-phosphate
  modified_base 12: mod_base = OTHER; note = 2'-O-methyladenosine-3'-phosphate
  modified_base 13: mod_base = OTHER; note = 2'-O-methylcytidine-3'-phosphate
  modified_base 14: mod_base = OTHER; note = 2'-O-methylcytidine-3'-phosphate
  modified_base 15: mod_base = OTHER; note = 2'-O-methylguanosine-3'-phosphate
  modified_base 16: mod_base = OTHER; note = 2'-O-methyladenosine-3'-phosphate
  modified_base 17: mod_base = OTHER; note = 2'-O-methylguanosine-3'-phosphate
  modified_base 18: mod_base = OTHER; note = 2'-O-methyladenosine-3'-phosphate
  modified_base 19: mod_base = OTHER; note = 2'-O-methylcytidine-3'-phosphorothioate
  modified_base 20: mod_base = OTHER; note = 2'-O-methylcytidine-3'-phosphorothioate
  modified_base 21: mod_base = OTHER; note = 2'-O-methyladenosine
gggagaacttcaccgagacca

SEQ ID NO: 628 - RNA, 23 nt, synthetic construct
  source 1..23: mol_type = other RNA
  modified_base 1: mod_base = OTHER; note = 2'-O-methyluridine-3'-phosphorothioate 5'-(E)-Vinylphosphonate
  modified_base 2: mod_base = OTHER; note = 2'-deoxy-2'-fluoroguanosine-3'-phosphorothioate
  modified_base 3: mod_base = OTHER; note = 2'-O-methylguanosine-3'-phosphate
  modified_base 4: mod_base = OTHER; note = 2'-O-methyluridine-3'-phosphate
  modified_base 5: mod_base = OTHER; note = 2'-O-methylcytidine-3'-phosphate
  modified_base 6: mod_base = OTHER; note = 2'-deoxy-2'-fluorouridine-3'-phosphate
  modified_base 7: mod_base = OTHER; note = 2'-O-methylcytidine-3'-phosphate
  modified_base 8: mod_base = OTHER; note = 2'-deoxy-2'-fluoroguanosine-3'-phosphate
  modified_base 9: mod_base = OTHER; note = 2'-deoxy-2'-fluoroguanosine-3'-phosphate
  modified_base 10: mod_base = OTHER; note = 2'-O-methyluridine-3'-phosphate
  modified_base 11: mod_base = OTHER; note = 2'-O-methylguanosine-3'-phosphate
  modified_base 12: mod_base = OTHER; note = 2'-O-methyladenosine-3'-phosphate
  modified_base 13: mod_base = OTHER; note = 2'-O-methyladenosine-3'-phosphate
  modified_base 14: mod_base = OTHER; note = 2'-deoxy-2'-fluoroguanosine-3'-phosphate
  modified_base 15: mod_base = OTHER; note = 2'-O-methyluridine-3'-phosphate
  modified_base 16: mod_base = OTHER; note = 2'-deoxy-2'-fluorouridine-3'-phosphate
  modified_base 17: mod_base = OTHER; note = 2'-O-methylcytidine-3'-phosphate
  modified_base 18: mod_base = OTHER; note = 2'-O-methyluridine-3'-phosphate
  modified_base 19: mod_base = OTHER; note = 2'-O-methylcytidine-3'-phosphate
  modified_base 20: mod_base = OTHER; note = 2'-O-methylcytidine-3'-phosphate
  modified_base 21: mod_base = OTHER; note = 2'-O-methylcytidine-3'-phosphorothioate
  modified_base 22: mod_base = OTHER; note = 2'-O-methylcytidine-3'-phosphorothioate
  modified_base 23: mod_base = OTHER; note = 2'-O-methylcytidine
tggtctcggtgaagttctccccc

SEQ ID NO: 629 - RNA, 23 nt, synthetic construct
  source 1..23: mol_type = other RNA
gggggagaacttcaccgagaccg

SEQ ID NO: 630 - RNA, 21 nt, synthetic construct
  source 1..21: mol_type = other RNA
  modified_base 1: mod_base = OTHER; note = 2'-O-methyluridine-3'-phosphorothioate
  modified_base 2: mod_base = OTHER; note = 2'-O-methylcytidine-3'-phosphorothioate
  modified_base 3: mod_base = OTHER; note = 2'-O-methyluridine-3'-phosphate
  modified_base 4: mod_base = OTHER; note = 2'-O-methylguanosine-3'-phosphate
  modified_base 5: mod_base = OTHER; note = 2'-O-methyluridine-3'-phosphate
  modified_base 6: mod_base = OTHER; note = 2'-O-hexadecyl-guanosine-3'-phosphate
  modified_base 7: mod_base = OTHER; note = 2'-deoxy-2'-fluorouridine-3'-phosphate
  modified_base 8: mod_base = OTHER; note = 2'-O-methylguanosine-3'-phosphate
  modified_base 9: mod_base = OTHER; note = 2'-deoxy-2'-fluorouridine-3'-phosphate
  modified_base 10: mod_base = OTHER; note = 2'-deoxy-2'-fluoroadenosine-3'-phosphate
  modified_base 11: mod_base = OTHER; note = 2'-deoxy-2'-fluorocytidine-3'-phosphate
  modified_base 12: mod_base = OTHER; note = 2'-O-methylcytidine-3'-phosphate
  modified_base 13: mod_base = OTHER; note = 2'-O-methylguanosine-3'-phosphate
  modified_base 14: mod_base = OTHER; note = 2'-O-methyladenosine-3'-phosphate
  modified_base 15: mod_base = OTHER; note = 2'-O-methylguanosine-3'-phosphate
  modified_base 16: mod_base = OTHER; note = 2'-O-methyladenosine-3'-phosphate
  modified_base 17: mod_base = OTHER; note = 2'-O-methyladenosine-3'-phosphate
  modified_base 18: mod_base = OTHER; note = 2'-O-methylcytidine-3'-phosphate
  modified_base 19: mod_base = OTHER; note = 2'-O-methyluridine-3'-phosphorothioate
  modified_base 20: mod_base = OTHER; note = 2'-O-methylguanosine-3'-phosphorothioate
  modified_base 21: mod_base = OTHER; note = 2'-O-methyladenosine
tctgtgtgtaccgagaactga

SEQ ID NO: 631 - RNA, 23 nt, synthetic construct
  source 1..23: mol_type = other RNA
  modified_base 1: mod_base = OTHER; note = 2'-O-methyluridine-3'-phosphorothioate 5'-(E)-Vinylphosphonate
  modified_base 2: mod_base = OTHER; note = 2'-deoxy-2'-fluorocytidine-3'-phosphorothioate
  modified_base 3: mod_base = OTHER; note = 2'-O-methyladenosine-3'-phosphate
  modified_base 4: mod_base = OTHER; note = 2'-O-methylguanosine-3'-phosphate
  modified_base 5: mod_base = OTHER; note = 2'-O-methyluridine-3'-phosphate
  modified_base 6: mod_base = OTHER; note = 2'-deoxy-2'-fluorouridine-3'-phosphate
  modified_base 7: mod_base = OTHER; note = 2'-O-methylcytidine-3'-phosphate
  modified_base 8: mod_base = OTHER; note = 2'-deoxy-2'-fluorouridine-3'-phosphate
  modified_base 9: mod_base = OTHER; note = 2'-deoxy-2'-fluorocytidine-3'-phosphate
  modified_base 10: mod_base = OTHER; note = 2'-O-methylguanosine-3'-phosphate
  modified_base 11: mod_base = OTHER; note = 2'-O-methylguanosine-3'-phosphate
  modified_base 12: mod_base = OTHER; note = 2'-O-methyluridine-3'-phosphate
  modified_base 13: mod_base = OTHER; note = 2'-O-methyladenosine-3'-phosphate
  modified_base 14: mod_base = OTHER; note = 2'-deoxy-2'-fluorocytidine-3'-phosphate
  modified_base 15: mod_base = OTHER; note = 2'-O-methyladenosine-3'-phosphate
  modified_base 16: mod_base = OTHER; note = 2'-deoxy-2'-fluorocytidine-3'-phosphate
  modified_base 17: mod_base = OTHER; note = 2'-O-methyladenosine-3'-phosphate
  modified_base 18: mod_base = OTHER; note = 2'-O-methylcytidine-3'-phosphate
  modified_base 19: mod_base = OTHER; note = 2'-O-methyladenosine-3'-phosphate
  modified_base 20: mod_base = OTHER; note = 2'-O-methylguanosine-3'-phosphate
  modified_base 21: mod_base = OTHER; note = 2'-O-methyladenosine-3'-phosphorothioate
  modified_base 22: mod_base = OTHER; note = 2'-O-methylguanosine-3'-phosphorothioate
  modified_base 23: mod_base = OTHER; note = 2'-O-methylcytidine
tcagttctcggtacacacagagc

SEQ ID NO: 632 - RNA, 23 nt, synthetic construct
  source 1..23: mol_type = other RNA
gctctgtgtgtaccgagaactgg

SEQ ID NO: 633 - RNA, 21 nt, synthetic construct
  source 1..21: mol_type = other RNA
  modified_base 1: mod_base = OTHER; note = 2'-O-methyluridine-3'-phosphorothioate
  modified_base 2: mod_base = OTHER; note = 2'-O-methyladenosine-3'-phosphorothioate
  modified_base 3: mod_base = OTHER; note = 2'-O-methyladenosine-3'-phosphate
  modified_base 4: mod_base = OTHER; note = 2'-O-methylguanosine-3'-phosphate
  modified_base 5: mod_base = OTHER; note = 2'-O-methyladenosine-3'-phosphate
  modified_base 6: mod_base = OTHER; note = 2'-O-hexadecyl-uridine-3'-phosphate
  modified_base 7: mod_base = OTHER; note = 2'-deoxy-2'-fluoroguanosine-3'-phosphate
  modified_base 8: mod_base = OTHER; note = 2'-O-methyladenosine-3'-phosphate
  modified_base 9: mod_base = OTHER; note = 2'-deoxy-2'-fluorouridine-3'-phosphate
  modified_base 10: mod_base = OTHER; note = 2'-deoxy-2'-fluoroguanosine-3'-phosphate
  modified_base 11: mod_base = OTHER; note = 2'-deoxy-2'-fluoroguanosine-3'-phosphate
  modified_base 12: mod_base = OTHER; note = 2'-O-methyladenosine-3'-phosphate
  modified_base 13: mod_base = OTHER; note = 2'-O-methylguanosine-3'-phosphate
  modified_base 14: mod_base = OTHER; note = 2'-O-methylcytidine-3'-phosphate
  modified_base 15: mod_base = OTHER; note = 2'-O-methylguanosine-3'-phosphate
  modified_base 16: mod_base = OTHER; note = 2'-O-methylcytidine-3'-phosphate
  modified_base 17: mod_base = OTHER; note = 2'-O-methylguanosine-3'-phosphate
  modified_base 18: mod_base = OTHER; note = 2'-O-methyluridine-3'-phosphate
  modified_base 19: mod_base = OTHER; note = 2'-O-methylguanosine-3'-phosphorothioate
  modified_base 20: mod_base = OTHER; note = 2'-O-methylguanosine-3'-phosphorothioate
  modified_base 21: mod_base = OTHER; note = 2'-O-methyladenosine
taagatgatggagcgcgtgga

SEQ ID NO: 634 - RNA, 23 nt, synthetic construct
  source 1..23: mol_type = other RNA
  modified_base 1: mod_base = OTHER; note = 2'-O-methyluridine-3'-phosphorothioate 5'-(E)-Vinylphosphonate
  modified_base 2: mod_base = OTHER; note = 2'-deoxy-2'-fluorocytidine-3'-phosphorothioate
  modified_base 3: mod_base = OTHER; note = 2'-O-methylcytidine-3'-phosphate
  modified_base 4: mod_base = OTHER; note = 2'-O-methyladenosine-3'-phosphate
  modified_base 5: mod_base = OTHER; note = 2'-O-methylcytidine-3'-phosphate
  modified_base 6: mod_base = OTHER; note = 2'-deoxy-2'-fluoroguanosine-3'-phosphate
  modified_base 7: mod_base = OTHER; note = 2'-O-methylcytidine-3'-phosphate
  modified_base 8: mod_base = OTHER; note = 2'-deoxy-2'-fluoroguanosine-3'-phosphate
  modified_base 9: mod_base = OTHER; note = 2'-deoxy-2'-fluorocytidine-3'-phosphate
  modified_base 10: mod_base = OTHER; note = 2'-O-methyluridine-3'-phosphate
  modified_base 11: mod_base = OTHER; note = 2'-O-methylcytidine-3'-phosphate
  modified_base 12: mod_base = OTHER; note = 2'-O-methylcytidine-3'-phosphate
  modified_base 13: mod_base = OTHER; note = 2'-O-methyladenosine-3'-phosphate
  modified_base 14: mod_base = OTHER; note = 2'-deoxy-2'-fluorouridine-3'-phosphate
  modified_base 15: mod_base = OTHER; note = 2'-O-methylcytidine-3'-phosphate
  modified_base 16: mod_base = OTHER; note = 2'-deoxy-2'-fluoroadenosine-3'-phosphate
  modified_base 17: mod_base = OTHER; note = 2'-O-methyluridine-3'-phosphate
  modified_base 18: mod_base = OTHER; note = 2'-O-methylcytidine-3'-phosphate
  modified_base 19: mod_base = OTHER; note = 2'-O-methyluridine-3'-phosphate
  modified_base 20: mod_base = OTHER; note = 2'-O-methyluridine-3'-phosphate
  modified_base 21: mod_base = OTHER; note = 2'-O-methyladenosine-3'-phosphorothioate
  modified_base 22: mod_base = OTHER; note = 2'-O-methyladenosine-3'-phosphorothioate
  modified_base 23: mod_base = OTHER; note = 2'-O-methylcytidine
tccacgcgctccatcatcttaac

SEQ ID NO: 635 - RNA, 23 nt, synthetic construct
  source 1..23: mol_type = other RNA
gttaagatgatggagcgcgtggt

SEQ ID NO: 636 - RNA, 21 nt, synthetic construct
  source 1..21: mol_type = other RNA
  modified_base 1: mod_base = OTHER; note = 2'-O-methyladenosine-3'-phosphorothioate
  modified_base 2: mod_base = OTHER; note = 2'-O-methyladenosine-3'-phosphorothioate
  modified_base 3: mod_base = OTHER; note = 2'-O-methylguanosine-3'-phosphate
  modified_base 4: mod_base = OTHER; note = 2'-O-methylcytidine-3'-phosphate
  modified_base 5: mod_base = OTHER; note = 2'-O-methyladenosine-3'-phosphate
  modified_base 6: mod_base = OTHER; note = 2'-O-hexadecyl-guanosine-3'-phosphate
  modified_base 7: mod_base = OTHER; note = 2'-deoxy-2'-fluorocytidine-3'-phosphate
  modified_base 8: mod_base = OTHER; note = 2'-O-methyladenosine-3'-phosphate
  modified_base 9: mod_base = OTHER; note = 2'-deoxy-2'-fluorocytidine-3'-phosphate
  modified_base 10: mod_base = OTHER; note = 2'-deoxy-2'-fluoroadenosine-3'-phosphate
  modified_base 11: mod_base = OTHER; note = 2'-deoxy-2'-fluorocytidine-3'-phosphate
  modified_base 12: mod_base = OTHER; note = 2'-O-methylguanosine-3'-phosphate
  modified_base 13: mod_base = OTHER; note = 2'-O-methylguanosine-3'-phosphate
  modified_base 14: mod_base = OTHER; note = 2'-O-methyluridine-3'-phosphate
  modified_base 15: mod_base = OTHER; note = 2'-O-methylcytidine-3'-phosphate
  modified_base 16: mod_base = OTHER; note = 2'-O-methyladenosine-3'-phosphate
  modified_base 17: mod_base = OTHER; note = 2'-O-methylcytidine-3'-phosphate
  modified_base 18: mod_base = OTHER; note = 2'-O-methylcytidine-3'-phosphate
  modified_base 19: mod_base = OTHER; note = 2'-O-methyladenosine-3'-phosphorothioate
  modified_base 20: mod_base = OTHER; note = 2'-O-methylcytidine-3'-phosphorothioate
  modified_base 21: mod_base = OTHER; note = 2'-O-methyladenosine
aagcagcacacggtcaccaca

SEQ ID NO: 637 - RNA, 23 nt, synthetic construct
  source 1..23: mol_type = other RNA
  modified_base 1: mod_base = OTHER; note = 2'-O-methyluridine-3'-phosphorothioate 5'-(E)-Vinylphosphonate
  modified_base 2: mod_base = OTHER; note = 2'-deoxy-2'-fluoroguanosine-3'-phosphorothioate
  modified_base 3: mod_base = OTHER; note = 2'-O-methyluridine-3'-phosphate
  modified_base 4: mod_base = OTHER; note = 2'-O-methylguanosine-3'-phosphate
  modified_base 5: mod_base = OTHER; note = 2'-O-methylguanosine-3'-phosphate
  modified_base 6: mod_base = OTHER; note = 2'-deoxy-2'-fluorouridine-3'-phosphate
  modified_base 7: mod_base = OTHER; note = 2'-O-methylguanosine-3'-phosphate
  modified_base 8: mod_base = OTHER; note = 2'-deoxy-2'-fluoroadenosine-3'-phosphate
  modified_base 9: mod_base = OTHER; note = 2'-deoxy-2'-fluorocytidine-3'-phosphate
  modified_base 10: mod_base = OTHER; note = 2'-O-methylcytidine-3'-phosphate
  modified_base 11: mod_base = OTHER; note = 2'-O-methylguanosine-3'-phosphate
  modified_base 12: mod_base = OTHER; note = 2'-O-methyluridine-3'-phosphate
  modified_base 13: mod_base = OTHER; note = 2'-O-methylguanosine-3'-phosphate
  modified_base 14: mod_base = OTHER; note = 2'-deoxy-2'-fluorouridine-3'-phosphate
  modified_base 15: mod_base = OTHER; note = 2'-O-methylguanosine-3'-phosphate
  modified_base 16: mod_base = OTHER; note = 2'-deoxy-2'-fluorocytidine-3'-phosphate
  modified_base 17: mod_base = OTHER; note = 2'-O-methyluridine-3'-phosphate
  modified_base 18: mod_base = OTHER; note = 2'-O-methylguanosine-3'-phosphate
  modified_base 19: mod_base = OTHER; note = 2'-O-methylcytidine-3'-phosphate
  modified_base 20: mod_base = OTHER; note = 2'-O-methyluridine-3'-phosphate
  modified_base 21: mod_base = OTHER; note = 2'-O-methyluridine-3'-phosphorothioate
  modified_base 22: mod_base = OTHER; note = 2'-O-methylguanosine-3'-phosphorothioate
  modified_base 23: mod_base = OTHER; note = 2'-O-methyladenosine
tgtggtgaccgtgtgctgcttga

SEQ ID NO: 638 - RNA, 23 nt, synthetic construct
  source 1..23: mol_type = other RNA
tcaagcagcacacggtcaccaca

SEQ ID NO: 639 - RNA, 21 nt, synthetic construct
  source 1..21: mol_type = other RNA
  modified_base 1: mod_base = OTHER; note = 2'-O-methyladenosine-3'-phosphorothioate
  modified_base 2: mod_base = OTHER; note = 2'-O-methylguanosine-3'-phosphorothioate
  modified_base 3: mod_base = OTHER; note = 2'-O-methyluridine-3'-phosphate
  modified_base 4: mod_base = OTHER; note = 2'-O-methylguanosine-3'-phosphate
  modified_base 5: mod_base = OTHER; note = 2'-O-methylguanosine-3'-phosphate
  modified_base 6: mod_base = OTHER; note = 2'-O-hexadecyl-adenosine-3'-phosphate
  modified_base 7: mod_base = OTHER; note = 2'-deoxy-2'-fluoroadenosine-3'-phosphate
  modified_base 8: mod_base = OTHER; note = 2'-O-methylcytidine-3'-phosphate
  modified_base 9: mod_base = OTHER; note = 2'-deoxy-2'-fluoroadenosine-3'-phosphate
  modified_base 10: mod_base = OTHER; note = 2'-deoxy-2'-fluoroadenosine-3'-phosphate
  modified_base 11: mod_base = OTHER; note = 2'-deoxy-2'-fluoroguanosine-3'-phosphate
  modified_base 12: mod_base = OTHER; note = 2'-O-methylcytidine-3'-phosphate
  modified_base 13: mod_base = OTHER; note = 2'-O-methylcytidine-3'-phosphate
  modified_base 14: mod_base = OTHER; note = 2'-O-methylguanosine-3'-phosphate
  modified_base 15: mod_base = OTHER; note = 2'-O-methyladenosine-3'-phosphate
  modified_base 16: mod_base = OTHER; note = 2'-O-methylguanosine-3'-phosphate
  modified_base 17: mod_base = OTHER; note = 2'-O-methyluridine-3'-phosphate
  modified_base 18: mod_base = OTHER; note = 2'-O-methyladenosine-3'-phosphate
  modified_base 19: mod_base = OTHER; note = 2'-O-methyladenosine-3'-phosphorothioate
  modified_base 20: mod_base = OTHER; note = 2'-O-methylguanosine-3'-phosphorothioate
  modified_base 21: mod_base = OTHER; note = 2'-O-methyladenosine
agtggaacaagccgagtaaga

SEQ ID NO: 640 - RNA, 23 nt, synthetic construct
  source 1..23: mol_type = other RNA
  modified_base 1: mod_base = OTHER; note = 2'-O-methyluridine-3'-phosphorothioate 5'-(E)-Vinylphosphonate
  modified_base 2: mod_base = OTHER; note = 2'-deoxy-2'-fluorocytidine-3'-phosphorothioate
  modified_base 3: mod_base = OTHER; note = 2'-O-methyluridine-3'-phosphate
  modified_base 4: mod_base = OTHER; note = 2'-O-methyluridine-3'-phosphate
  modified_base 5: mod_base = OTHER; note = 2'-O-methyladenosine-3'-phosphate
  modified_base 6: mod_base = OTHER; note = 2'-deoxy-2'-fluorocytidine-3'-phosphate
  modified_base 7: mod_base = OTHER; note = 2'-O-methyluridine-3'-phosphate
  modified_base 8: mod_base = OTHER; note = 2'-deoxy-2'-fluorocytidine-3'-phosphate
  modified_base 9: mod_base = OTHER; note = 2'-deoxy-2'-fluoroguanosine-3'-phosphate
  modified_base 10: mod_base = OTHER; note = 2'-O-methylguanosine-3'-phosphate
  modified_base 11: mod_base = OTHER; note = 2'-O-methylcytidine-3'-phosphate
  modified_base 12: mod_base = OTHER; note = 2'-O-methyluridine-3'-phosphate
  modified_base 13: mod_base = OTHER; note = 2'-O-methyluridine-3'-phosphate
  modified_base 14: mod_base = OTHER; note = 2'-deoxy-2'-fluoroguanosine-3'-phosphate
  modified_base 15: mod_base = OTHER; note = 2'-O-methyluridine-3'-phosphate
  modified_base 16: mod_base = OTHER; note = 2'-deoxy-2'-fluorouridine-3'-phosphate
  modified_base 17: mod_base = OTHER; note = 2'-O-methylcytidine-3'-phosphate
  modified_base 18: mod_base = OTHER; note = 2'-O-methylcytidine-3'-phosphate
  modified_base 19: mod_base = OTHER; note = 2'-O-methyladenosine-3'-phosphate
  modified_base 20: mod_base = OTHER; note = 2'-O-methylcytidine-3'-phosphate
  modified_base 21: mod_base = OTHER; note = 2'-O-methyluridine-3'-phosphorothioate
  modified_base 22: mod_base = OTHER; note = 2'-O-methylguanosine-3'-phosphorothioate
  modified_base 23: mod_base = OTHER; note = 2'-O-methyladenosine
tcttactcggcttgttccactga

SEQ ID NO: 641 - RNA, 23 nt, synthetic construct
  source 1..23: mol_type = other RNA
tcagtggaacaagccgagtaagc

SEQ ID NO: 642 - RNA, 21 nt, synthetic construct
  source 1..21: mol_type = other RNA
  modified_base 1: mod_base = OTHER; note = 2'-O-methyluridine-3'-phosphorothioate
  modified_base 2: mod_base = OTHER; note = 2'-O-methyladenosine-3'-phosphorothioate
  modified_base 3: mod_base = OTHER; note = 2'-O-methyluridine-3'-phosphate
  modified_base 4: mod_base = OTHER; note = 2'-O-methylcytidine-3'-phosphate
  modified_base 5: mod_base = OTHER; note = 2'-O-methyluridine-3'-phosphate
  modified_base 6: mod_base = OTHER; note = 2'-O-hexadecyl-guanosine-3'-phosphate
  modified_base 7: mod_base = OTHER; note = 2'-deoxy-2'-fluoroadenosine-3'-phosphate
  modified_base 8: mod_base = OTHER; note = 2'-O-methylcytidine-3'-phosphate
  modified_base 9: mod_base = OTHER; note = 2'-deoxy-2'-fluorouridine-3'-phosphate
  modified_base 10: mod_base = OTHER; note = 2'-deoxy-2'-fluoroguanosine-3'-phosphate
  modified_base 11: mod_base = OTHER; note = 2'-deoxy-2'-fluoroadenosine-3'-phosphate
  modified_base 12: mod_base = OTHER; note = 2'-O-methyladenosine-3'-phosphate
  modified_base 13: mod_base = OTHER; note = 2'-O-methyladenosine-3'-phosphate
  modified_base 14: mod_base = OTHER; note = 2'-O-methyluridine-3'-phosphate
  modified_base 15: mod_base = OTHER; note = 2'-O-methyluridine-3'-phosphate
  modified_base 16: mod_base = OTHER; note = 2'-O-methyladenosine-3'-phosphate
  modified_base 17: mod_base = OTHER; note = 2'-O-methyladenosine-3'-phosphate
  modified_base 18: mod_base = OTHER; note = 2'-O-methyladenosine-3'-phosphate
  modified_base 19: mod_base = OTHER; note = 2'-O-methylcytidine-3'-phosphorothioate
  modified_base 20: mod_base = OTHER; note = 2'-O-methylguanosine-3'-phosphorothioate
  modified_base 21: mod_base = OTHER; note = 2'-O-methyladenosine
tatctgactgaaattaaacga

SEQ ID NO: 643 - RNA, 23 nt, synthetic construct
  source 1..23: mol_type = other RNA
  modified_base 1: mod_base = OTHER; note = 2'-O-methyluridine-3'-phosphorothioate 5'-(E)-Vinylphosphonate
  modified_base 2: mod_base = OTHER; note = 2'-deoxy-2'-fluorocytidine-3'-phosphorothioate
  modified_base 3: mod_base = OTHER; note = 2'-O-methylguanosine-3'-phosphate
  modified_base 4: mod_base = OTHER; note = 2'-O-methyluridine-3'-phosphate
  modified_base 5: mod_base = OTHER; note = 2'-O-methyluridine-3'-phosphate
  modified_base 6: mod_base = OTHER; note = 2'-deoxy-2'-fluorouridine-3'-phosphate
  modified_base 7: mod_base = OTHER; note = 2'-O-methyladenosine-3'-phosphate
  modified_base 8: mod_base = OTHER; note = 2'-deoxy-2'-fluoroadenosine-3'-phosphate
  modified_base 9: mod_base = OTHER; note = 2'-deoxy-2'-fluorouridine-3'-phosphate
  modified_base 10: mod_base = OTHER; note = 2'-O-methyluridine-3'-phosphate
  modified_base 11: mod_base = OTHER; note = 2'-O-methyluridine-3'-phosphate
  modified_base 12: mod_base = OTHER; note = 2'-O-methylcytidine-3'-phosphate
  modified_base 13: mod_base = OTHER; note = 2'-O-methyladenosine-3'-phosphate
  modified_base 14: mod_base = OTHER; note = 2'-deoxy-2'-fluoroguanosine-3'-phosphate
  modified_base 15: mod_base = OTHER; note = 2'-O-methyluridine-3'-phosphate
  modified_base 16: mod_base = OTHER; note = 2'-deoxy-2'-fluorocytidine-3'-phosphate
  modified_base 17: mod_base = OTHER; note = 2'-O-methyladenosine-3'-phosphate
  modified_base 18: mod_base = OTHER; note = 2'-O-methylguanosine-3'-phosphate
  modified_base 19: mod_base = OTHER; note = 2'-O-methyladenosine-3'-phosphate
  modified_base 20: mod_base = OTHER; note = 2'-O-methyluridine-3'-phosphate
  modified_base 21: mod_base = OTHER; note = 2'-O-methyladenosine-3'-phosphorothioate
  modified_base 22: mod_base = OTHER; note = 2'-O-methyluridine-3'-phosphorothioate
  modified_base 23: mod_base = OTHER; note = 2'-O-methyluridine
tcgtttaatttcagtcagatatt

SEQ ID NO: 644 - RNA, 23 nt, synthetic construct
  source 1..23: mol_type = other RNA
aatatctgactgaaattaaacga

SEQ ID NO: 645 - RNA, 21 nt, synthetic construct
  source 1..21: mol_type = other RNA
  modified_base 1: mod_base = OTHER; note = 2'-O-methyladenosine-3'-phosphorothioate
  modified_base 2: mod_base = OTHER; note = 2'-O-methyladenosine-3'-phosphorothioate
  modified_base 3: mod_base = OTHER; note = 2'-O-methyluridine-3'-phosphate
  modified_base 4: mod_base = OTHER; note = 2'-O-methylcytidine-3'-phosphate
  modified_base 5: mod_base = OTHER; note = 2'-O-methyladenosine-3'-phosphate
  modified_base 6: mod_base = OTHER; note = 2'-O-hexadecyl-adenosine-3'-phosphate
  modified_base 7: mod_base = OTHER; note = 2'-deoxy-2'-fluoroguanosine-3'-phosphate
  modified_base 8: mod_base = OTHER; note = 2'-O-methylcytidine-3'-phosphate
  modified_base 9: mod_base = OTHER; note = 2'-deoxy-2'-fluoroadenosine-3'-phosphate
  modified_base 10: mod_base = OTHER; note = 2'-deoxy-2'-fluoroguanosine-3'-phosphate
  modified_base 11: mod_base = OTHER; note = 2'-deoxy-2'-fluorocytidine-3'-phosphate
  modified_base 12: mod_base = OTHER; note = 2'-O-methyladenosine-3'-phosphate
  modified_base 13: mod_base = OTHER; note = 2'-O-methylcytidine-3'-phosphate
  modified_base 14: mod_base = OTHER; note = 2'-O-methyladenosine-3'-phosphate
  modified_base 15: mod_base = OTHER; note = 2'-O-methylcytidine-3'-phosphate
  modified_base 16: mod_base = OTHER; note = 2'-O-methylguanosine-3'-phosphate
  modified_base 17: mod_base = OTHER; note = 2'-O-methylguanosine-3'-phosphate
  modified_base 18: mod_base = OTHER; note = 2'-O-methyluridine-3'-phosphate
  modified_base 19: mod_base = OTHER; note = 2'-O-methylcytidine-3'-phosphorothioate
  modified_base 20: mod_base = OTHER; note = 2'-O-methyladenosine-3'-phosphorothioate
  modified_base 21: mod_base = OTHER; note = 2'-O-methyladenosine
aatcaagcagcacacggtcaa

SEQ ID NO: 646 - RNA, 23 nt, synthetic construct
  source 1..23: mol_type = other RNA
  modified_base 1: mod_base = OTHER; note = 2'-O-methyluridine-3'-phosphorothioate 5'-(E)-Vinylphosphonate
  modified_base 2: mod_base = OTHER; note = 2'-deoxy-2'-fluorouridine-3'-phosphorothioate
  modified_base 3: mod_base = OTHER; note = 2'-O-methylguanosine-3'-phosphate
  modified_base 4: mod_base = OTHER; note = 2'-O-methyladenosine-3'-phosphate
  modified_base 5: mod_base = OTHER; note = 2'-O-methylcytidine-3'-phosphate
  modified_base 6: mod_base = OTHER; note = 2'-deoxy-2'-fluorocytidine-3'-phosphate
  modified_base 7: mod_base = OTHER; note = 2'-O-methylguanosine-3'-phosphate
  modified_base 8: mod_base = OTHER; note = 2'-deoxy-2'-fluorouridine-3'-phosphate
  modified_base 9: mod_base = OTHER; note = 2'-deoxy-2'-fluoroguanosine-3'-phosphate
  modified_base 10: mod_base = OTHER; note = 2'-O-methyluridine-3'-phosphate
  modified_base 11: mod_base = OTHER; note = 2'-O-methylguanosine-3'-phosphate
  modified_base 12: mod_base = OTHER; note = 2'-O-methylcytidine-3'-phosphate
  modified_base 13: mod_base = OTHER; note = 2'-O-methyluridine-3'-phosphate
  modified_base 14: mod_base = OTHER; note = 2'-deoxy-2'-fluoroguanosine-3'-phosphate
  modified_base 15: mod_base = OTHER; note = 2'-O-methylcytidine-3'-phosphate
  modified_base 16: mod_base = OTHER; note = 2'-deoxy-2'-fluorouridine-3'-phosphate
  modified_base 17: mod_base = OTHER; note = 2'-O-methyluridine-3'-phosphate
  modified_base 18: mod_base = OTHER; note = 2'-O-methylguanosine-3'-phosphate
  modified_base 19: mod_base = OTHER; note = 2'-O-methyladenosine-3'-phosphate
  modified_base 20: mod_base = OTHER; note = 2'-O-methyluridine-3'-phosphate
  modified_base 21: mod_base = OTHER; note = 2'-O-methyluridine-3'-phosphorothioate
  modified_base 22: mod_base = OTHER; note = 2'-O-methylguanosine-3'-phosphorothioate
  modified_base 23: mod_base = OTHER; note = 2'-O-methyluridine
ttgaccgtgtgctgcttgattgt

SEQ ID NO: 647 - RNA, 23 nt, synthetic construct
  source 1..23: mol_type = other RNA
acaatcaagcagcacacggtcac

SEQ ID NO: 648 - RNA, 21 nt, synthetic construct
  source 1..21: mol_type = other RNA
  modified_base 1: mod_base = OTHER; note = 2'-O-methyluridine-3'-phosphorothioate
  modified_base 2: mod_base = OTHER; note = 2'-O-methylguanosine-3'-phosphorothioate
  modified_base 3: mod_base = OTHER; note = 2'-O-methyluridine-3'-phosphate
  modified_base 4: mod_base = OTHER; note = 2'-O-methylguanosine-3'-phosphate
  modified_base 5: mod_base = OTHER; note = 2'-O-methylcytidine-3'-phosphate
  modified_base 6: mod_base = OTHER; note = 2'-O-hexadecyl-adenosine-3'-phosphate
  modified_base 7: mod_base = OTHER; note = 2'-deoxy-2'-fluorocytidine-3'-phosphate
  modified_base 8: mod_base = OTHER; note = 2'-O-methylguanosine-3'-phosphate
  modified_base 9: mod_base = OTHER; note = 2'-deoxy-2'-fluoroadenosine-3'-phosphate
  modified_base 10: mod_base = OTHER; note = 2'-deoxy-2'-fluorocytidine-3'-phosphate
  modified_base 11: mod_base = OTHER; note = 2'-deoxy-2'-fluorouridine-3'-phosphate
  modified_base 12: mod_base = OTHER; note = 2'-O-methylguanosine-3'-phosphate
  modified_base 13: mod_base = OTHER; note = 2'-O-methylcytidine-3'-phosphate
  modified_base 14: mod_base = OTHER; note = 2'-O-methylguanosine-3'-phosphate
  modified_base 15: mod_base = OTHER; note = 2'-O-methyluridine-3'-phosphate
  modified_base 16: mod_base = OTHER; note = 2'-O-methylcytidine-3'-phosphate
  modified_base 17: mod_base = OTHER; note = 2'-O-methyladenosine-3'-phosphate
  modified_base 18: mod_base = OTHER; note = 2'-O-methyladenosine-3'-phosphate
  modified_base 19: mod_base = OTHER; note = 2'-O-methyluridine-3'-phosphorothioate
  modified_base 20: mod_base = OTHER; note = 2'-O-methyladenosine-3'-phosphorothioate
  modified_base 21: mod_base = OTHER; note = 2'-O-methyladenosine
tgtgcacgactgcgtcaataa

SEQ ID NO: 649 - RNA, 23 nt, synthetic construct
  source 1..23: mol_type = other RNA
  modified_base 1: mod_base = OTHER; note = 2'-O-methyluridine-3'-phosphorothioate 5'-(E)-Vinylphosphonate
  modified_base 2: mod_base = OTHER; note = 2'-deoxy-2'-fluorouridine-3'-phosphorothioate
  modified_base 3: mod_base = OTHER; note = 2'-O-methyladenosine-3'-phosphate
  modified_base 4: mod_base = OTHER; note = 2'-O-methyluridine-3'-phosphate
  modified_base 5: mod_base = OTHER; note = 2'-O-methyluridine-3'-phosphate
  modified_base 6: mod_base = OTHER; note = 2'-deoxy-2'-fluoroguanosine-3'-phosphate
  modified_base 7: mod_base = OTHER; note = 2'-O-methyladenosine-3'-phosphate
  modified_base 8: mod_base = OTHER; note = 2'-deoxy-2'-fluorocytidine-3'-phosphate
  modified_base 9: mod_base = OTHER; note = 2'-deoxy-2'-fluoroguanosine-3'-phosphate
  modified_base 10: mod_base = OTHER; note = 2'-O-methylcytidine-3'-phosphate
  modified_base 11: mod_base = OTHER; note = 2'-O-methyladenosine-3'-phosphate
  modified_base 12: mod_base = OTHER; note = 2'-O-methylguanosine-3'-phosphate
  modified_base 13: mod_base = OTHER; note = 2'-O-methyluridine-3'-phosphate
  modified_base 14: mod_base = OTHER; note = 2'-deoxy-2'-fluorocytidine-3'-phosphate
  modified_base 15: mod_base = OTHER; note = 2'-O-methylguanosine-3'-phosphate
  modified_base 16: mod_base = OTHER; note = 2'-deoxy-2'-fluorouridine-3'-phosphate
  modified_base 17: mod_base = OTHER; note = 2'-O-methylguanosine-3'-phosphate
  modified_base 18: mod_base = OTHER; note = 2'-O-methylcytidine-3'-phosphate
  modified_base 19: mod_base = OTHER; note = 2'-O-methyladenosine-3'-phosphate
  modified_base 20: mod_base = OTHER; note = 2'-O-methylcytidine-3'-phosphate
  modified_base 21: mod_base = OTHER; note = 2'-O-methyladenosine-3'-phosphorothioate
  modified_base 22: mod_base = OTHER; note = 2'-O-methyladenosine-3'-phosphorothioate
  modified_base 23: mod_base = OTHER; note = 2'-O-methyladenosine
ttattgacgcagtcgtgcacaaa

SEQ ID NO: 650 - RNA, 23 nt, synthetic construct
  source 1..23: mol_type = other RNA
tttgtgcacgactgcgtcaatat

SEQ ID NO: 651 - RNA, 21 nt, synthetic construct
  source 1..21: mol_type = other RNA
  modified_base 1: mod_base = OTHER; note = 2'-O-methylcytidine-3'-phosphorothioate
  modified_base 2: mod_base = OTHER; note = 2'-O-methyladenosine-3'-phosphorothioate
  modified_base 3: mod_base = OTHER; note = 2'-O-methyladenosine-3'-phosphate
  modified_base 4: mod_base = OTHER; note = 2'-O-methyluridine-3'-phosphate
  modified_base 5: mod_base = OTHER; note = 2'-O-methylcytidine-3'-phosphate
  modified_base 6: mod_base = OTHER; note = 2'-O-hexadecyl-adenosine-3'-phosphate
  modified_base 7: mod_base = OTHER; note = 2'-deoxy-2'-fluoroadenosine-3'-phosphate
  modified_base 8: mod_base = OTHER; note = 2'-O-methylguanosine-3'-phosphate
  modified_base 9: mod_base = OTHER; note = 2'-deoxy-2'-fluorocytidine-3'-phosphate
  modified_base 10: mod_base = OTHER; note = 2'-deoxy-2'-fluoroadenosine-3'-phosphate
  modified_base 11: mod_base = OTHER; note = 2'-deoxy-2'-fluoroguanosine-3'-phosphate
  modified_base 12: mod_base = OTHER; note = 2'-O-methylcytidine-3'-phosphate
  modified_base 13: mod_base = OTHER; note = 2'-O-methyladenosine-3'-phosphate
  modified_base 14: mod_base = OTHER; note = 2'-O-methylcytidine-3'-phosphate
  modified_base 15: mod_base = OTHER; note = 2'-O-methyladenosine-3'-phosphate
  modified_base 16: mod_base = OTHER; note = 2'-O-methylcytidine-3'-phosphate
  modified_base 17: mod_base = OTHER; note = 2'-O-methylguanosine-3'-phosphate
  modified_base 18: mod_base = OTHER; note = 2'-O-methylguanosine-3'-phosphate
  modified_base 19: mod_base = OTHER; note = 2'-O-methyluridine-3'-phosphorothioate
  modified_base 20: mod_base = OTHER; note = 2'-O-methylcytidine-3'-phosphorothioate
  modified_base 21: mod_base = OTHER; note = 2'-O-methyladenosine
caatcaagcagcacacggtca

SEQ ID NO: 652 - RNA, 23 nt, synthetic construct
  source 1..23: mol_type = other RNA
  modified_base 1: mod_base = OTHER; note = 2'-O-methyluridine-3'-phosphorothioate 5'-(E)-Vinylphosphonate
  modified_base 2: mod_base = OTHER; note = 2'-deoxy-2'-fluoroguanosine-3'-phosphorothioate
  modified_base 3: mod_base = OTHER; note = 2'-O-methyladenosine-3'-phosphate
  modified_base 4: mod_base = OTHER; note = 2'-O-methylcytidine-3'-phosphate
  modified_base 5: mod_base = OTHER; note = 2'-O-methylcytidine-3'-phosphate
  modified_base 6: mod_base = OTHER; note = 2'-deoxy-2'-fluoroguanosine-3'-phosphate
  modified_base 7: mod_base = OTHER; note = 2'-O-methyluridine-3'-phosphate
  modified_base 8: mod_base = OTHER; note = 2'-deoxy-2'-fluoroguanosine-3'-phosphate
  modified_base 9: mod_base = OTHER; note = 2'-deoxy-2'-fluorouridine-3'-phosphate
  modified_base 10: mod_base = OTHER; note = 2'-O-methylguanosine-3'-phosphate
  modified_base 11: mod_base = OTHER; note = 2'-O-methylcytidine-3'-phosphate
  modified_base 12: mod_base = OTHER; note = 2'-O-methyluridine-3'-phosphate
  modified_base 13: mod_base = OTHER; note = 2'-O-methylguanosine-3'-phosphate
  modified_base 14: mod_base = OTHER; note = 2'-deoxy-2'-fluorocytidine-3'-phosphate
  modified_base 15: mod_base = OTHER; note = 2'-O-methyluridine-3'-phosphate
  modified_base 16: mod_base = OTHER; note = 2'-deoxy-2'-fluorouridine-3'-phosphate
  modified_base 17: mod_base = OTHER; note = 2'-O-methylguanosine-3'-phosphate
  modified_base 18: mod_base = OTHER; note = 2'-O-methyladenosine-3'-phosphate
  modified_base 19: mod_base = OTHER; note = 2'-O-methyluridine-3'-phosphate
  modified_base 20: mod_base = OTHER; note = 2'-O-methyluridine-3'-phosphate
  modified_base 21: mod_base = OTHER; note = 2'-O-methylguanosine-3'-phosphorothioate
  modified_base 22: mod_base = OTHER; note = 2'-O-methyluridine-3'-phosphorothioate
  modified_base 23: mod_base = OTHER; note = 2'-O-methylguanosine
tgaccgtgtgctgcttgattgtg

SEQ ID NO: 653 - RNA, 23 nt, synthetic construct
  source 1..23: mol_type = other RNA
cacaatcaagcagcacacggtca

SEQ ID NO: 654 - RNA, 21 nt, synthetic construct
  source 1..21: mol_type = other RNA
  modified_base 1: mod_base = OTHER; note = 2'-O-methylguanosine-3'-phosphorothioate
  modified_base 2: mod_base = OTHER; note = 2'-O-methyluridine-3'-phosphorothioate
  modified_base 3: mod_base = OTHER; note = 2'-O-methylguanosine-3'-phosphate
  modified_base 4: mod_base = OTHER; note = 2'-O-methylcytidine-3'-phosphate
  modified_base 5: mod_base = OTHER; note = 2'-O-methyladenosine-3'-phosphate
  modified_base 6: mod_base = OTHER; note = 2'-O-hexadecyl-cytidine-3'-phosphate
  modified_base 7: mod_base = OTHER; note = 2'-deoxy-2'-fluoroguanosine-3'-phosphate
  modified_base 8: mod_base = OTHER; note = 2'-O-methyladenosine-3'-phosphate
  modified_base 9: mod_base = OTHER; note = 2'-deoxy-2'-fluorocytidine-3'-phosphate
  modified_base 10: mod_base = OTHER; note = 2'-deoxy-2'-fluorouridine-3'-phosphate
  modified_base 11: mod_base = OTHER; note = 2'-deoxy-2'-fluoroguanosine-3'-phosphate
  modified_base 12: mod_base = OTHER; note = 2'-O-methylcytidine-3'-phosphate
  modified_base 13: mod_base = OTHER; note = 2'-O-methylguanosine-3'-phosphate
  modified_base 14: mod_base = OTHER; note = 2'-O-methyluridine-3'-phosphate
  modified_base 15: mod_base = OTHER; note = 2'-O-methylcytidine-3'-phosphate
  modified_base 16: mod_base = OTHER; note = 2'-O-methyladenosine-3'-phosphate
  modified_base 17: mod_base = OTHER; note = 2'-O-methyladenosine-3'-phosphate
  modified_base 18: mod_base = OTHER; note = 2'-O-methyluridine-3'-phosphate
  modified_base 19: mod_base = OTHER; note = 2'-O-methyladenosine-3'-phosphorothioate
  modified_base 20: mod_base = OTHER; note = 2'-O-methyluridine-3'-phosphorothioate
  modified_base 21: mod_base = OTHER; note = 2'-O-methyladenosine
gtgcacgactgcgtcaatata

SEQ ID NO: 655 - RNA, 23 nt, synthetic construct
  source 1..23: mol_type = other RNA
  modified_base 1: mod_base = OTHER; note = 2'-O-methyluridine-3'-phosphorothioate 5'-(E)-Vinylphosphonate
  modified_base 2: mod_base = OTHER; note = 2'-deoxy-2'-fluoroadenosine-3'-phosphorothioate
  modified_base 3: mod_base = OTHER; note = 2'-O-methyluridine-3'-phosphate
  modified_base 4: mod_base = OTHER; note = 2'-O-methyladenosine-3'-phosphate
  modified_base 5: mod_base = OTHER; note = 2'-O-methyluridine-3'-phosphate
  modified_base 6: mod_base = OTHER; note = 2'-deoxy-2'-fluorouridine-3'-phosphate
  modified_base 7: mod_base = OTHER; note = 2'-O-methylguanosine-3'-phosphate
  modified_base 8: mod_base = OTHER; note = 2'-deoxy-2'-fluoroadenosine-3'-phosphate
  modified_base 9: mod_base = OTHER; note = 2'-deoxy-2'-fluorocytidine-3'-phosphate
  modified_base 10: mod_base = OTHER; note = 2'-O-methylguanosine-3'-phosphate
  modified_base 11: mod_base = OTHER; note = 2'-O-methylcytidine-3'-phosphate
  modified_base 12: mod_base = OTHER; note = 2'-O-methyladenosine-3'-phosphate
  modified_base 13: mod_base = OTHER; note = 2'-O-methylguanosine-3'-phosphate
  modified_base 14: mod_base = OTHER; note = 2'-deoxy-2'-fluorouridine-3'-phosphate
  modified_base 15: mod_base = OTHER; note = 2'-O-methylcytidine-3'-phosphate
  modified_base 16: mod_base = OTHER; note = 2'-deoxy-2'-fluoroguanosine-3'-phosphate
  modified_base 17: mod_base = OTHER; note = 2'-O-methyluridine-3'-phosphate
  modified_base 18: mod_base = OTHER; note = 2'-O-methylguanosine-3'-phosphate
  modified_base 19: mod_base = OTHER; note = 2'-O-methylcytidine-3'-phosphate
  modified_base 20: mod_base = OTHER; note = 2'-O-methyladenosine-3'-phosphate
  modified_base 21: mod_base = OTHER; note = 2'-O-methylcytidine-3'-phosphorothioate
  modified_base 22: mod_base = OTHER; note = 2'-O-methyladenosine-3'-phosphorothioate
  modified_base 23: mod_base = OTHER; note = 2'-O-methyladenosine
tatattgacgcagtcgtgcacaa

SEQ ID NO: 656 - RNA, 23 nt, synthetic construct
  source 1..23: mol_type = other RNA
ttgtgcacgactgcgtcaatatc

SEQ ID NO: 657 - RNA, 21 nt, synthetic construct
  source 1..21: mol_type = other RNA
  modified_base 1: mod_base = OTHER; note = 2'-O-methylcytidine-3'-phosphorothioate
  modified_base 2: mod_base = OTHER; note = 2'-O-methyluridine-3'-phosphorothioate
  modified_base 3: mod_base = OTHER; note = 2'-O-methylcytidine-3'-phosphate
  modified_base 4: mod_base = OTHER; note = 2'-O-methyladenosine-3'-phosphate
  modified_base 5: mod_base = OTHER; note = 2'-O-methyluridine-3'-phosphate
  modified_base 6: mod_base = OTHER; note = 2'-O-hexadecyl-cytidine-3'-phosphate
  modified_base 7: mod_base = OTHER; note = 2'-deoxy-2'-fluorouridine-3'-phosphate
  modified_base 8: mod_base = OTHER; note = 2'-O-methyluridine-3'-phosphate
  modified_base 9: mod_base = OTHER; note = 2'-deoxy-2'-fluorocytidine-3'-phosphate
  modified_base 10: mod_base = OTHER; note = 2'-deoxy-2'-fluorocytidine-3'-phosphate
  modified_base 11: mod_base = OTHER; note = 2'-deoxy-2'-fluorouridine-3'-phosphate
  modified_base 12: mod_base = OTHER; note = 2'-O-methylguanosine-3'-phosphate
  modified_base 13: mod_base = OTHER; note = 2'-O-methyladenosine-3'-phosphate
  modified_base 14: mod_base = OTHER; note = 2'-O-methyluridine-3'-phosphate
  modified_base 15: mod_base = OTHER; note = 2'-O-methyladenosine-3'-phosphate
  modified_base 16: mod_base = OTHER; note = 2'-O-methylguanosine-3'-phosphate
  modified_base 17: mod_base = OTHER; note = 2'-O-methyluridine-3'-phosphate
  modified_base 18: mod_base = OTHER; note = 2'-O-methylguanosine-3'-phosphate
  modified_base 19: mod_base = OTHER; note = 2'-O-methylguanosine-3'-phosphorothioate
  modified_base 20: mod_base = OTHER; note = 2'-O-methylguanosine-3'-phosphorothioate
  modified_base 21: mod_base = OTHER; note = 2'-O-methyladenosine
ctcatcttcctgatagtggga

SEQ ID NO: 658 - RNA, 23 nt, synthetic construct
  source 1..23: mol_type = other RNA
  modified_base 1: mod_base = OTHER; note = 2'-O-methyluridine-3'-phosphorothioate 5'-(E)-Vinylphosphonate
  modified_base 2: mod_base = OTHER; note = 2'-deoxy-2'-fluorocytidine-3'-phosphorothioate
  modified_base 3: mod_base = OTHER; note = 2'-O-methylcytidine-3'-phosphate
  modified_base 4: mod_base = OTHER; note = 2'-O-methylcytidine-3'-phosphate
  modified_base 5: mod_base = OTHER; note = 2'-O-methyladenosine-3'-phosphate
  modified_base 6: mod_base = OTHER; note = 2'-deoxy-2'-fluorocytidine-3'-phosphate
  modified_base 7: mod_base = OTHER; note = 2'-O-methyluridine-3'-phosphate
  modified_base 8: mod_base = OTHER; note = 2'-deoxy-2'-fluoroadenosine-3'-phosphate
  modified_base 9: mod_base = OTHER; note = 2'-deoxy-2'-fluorouridine-3'-phosphate
  modified_base 10: mod_base = OTHER; note = 2'-O-methylcytidine-3'-phosphate
  modified_base 11: mod_base = OTHER; note = 2'-O-methyladenosine-3'-phosphate
  modified_base 12: mod_base = OTHER; note = 2'-O-methylguanosine-3'-phosphate
  modified_base 13: mod_base = OTHER; note = 2'-O-methylguanosine-3'-phosphate
  modified_base 14: mod_base = OTHER; note = 2'-deoxy-2'-fluoroadenosine-3'-phosphate
  modified_base 15: mod_base = OTHER; note = 2'-O-methyladenosine-3'-phosphate
  modified_base 16: mod_base = OTHER; note = 2'-deoxy-2'-fluoroguanosine-3'-phosphate
  modified_base 17: mod_base = OTHER; note = 2'-O-methyladenosine-3'-phosphate
  modified_base 18: mod_base = OTHER; note = 2'-O-methyluridine-3'-phosphate
  modified_base 19: mod_base = OTHER; note = 2'-O-methylguanosine-3'-phosphate
  modified_base 20: mod_base = OTHER; note = 2'-O-methyladenosine-3'-phosphate
  modified_base 21: mod_base = OTHER; note = 2'-O-methylguanosine-3'-phosphorothioate
  modified_base 22: mod_base = OTHER; note = 2'-O-methylguanosine-3'-phosphorothioate
  modified_base 23: mod_base = OTHER; note = 2'-O-methyladenosine
tcccactatcaggaagatgagga

SEQ ID NO: 659 - RNA, 23 nt, synthetic construct
  source 1..23: mol_type = other RNA
tcctcatcttcctgatagtggga

SEQ ID NO: 660 - RNA, 21 nt, synthetic construct
  source 1..21: mol_type = other RNA
  modified_base 1: mod_base = OTHER; note = 2'-O-methyluridine-3'-phosphorothioate
  modified_base 2: mod_base = OTHER; note = 2'-O-methyluridine-3'-phosphorothioate
  modified_base 3: mod_base = OTHER; note = 2'-O-methyladenosine-3'-phosphate
  modified_base 4: mod_base = OTHER; note = 2'-O-methyladenosine-3'-phosphate
  modified_base 5: mod_base = OTHER; note = 2'-O-methylguanosine-3'-phosphate
  modified_base 6: mod_base = OTHER; note = 2'-O-hexadecyl-adenosine-3'-phosphate
  modified_base 7: mod_base = OTHER; note = 2'-deoxy-2'-fluorouridine-3'-phosphate
  modified_base 8: mod_base = OTHER; note = 2'-O-methylguanosine-3'-phosphate
  modified_base 9: mod_base = OTHER; note = 2'-deoxy-2'-fluoroadenosine-3'-phosphate
  modified_base 10: mod_base = OTHER; note = 2'-deoxy-2'-fluorouridine-3'-phosphate
  modified_base 11: mod_base = OTHER; note = 2'-deoxy-2'-fluoroguanosine-3'-phosphate
  modified_base 12: mod_base = OTHER; note = 2'-O-methylguanosine-3'-phosphate
  modified_base 13: mod_base = OTHER; note = 2'-O-methyladenosine-3'-phosphate
  modified_base 14: mod_base = OTHER; note = 2'-O-methylguanosine-3'-phosphate
  modified_base 15: mod_base = OTHER; note = 2'-O-methylcytidine-3'-phosphate
  modified_base 16: mod_base = OTHER; note = 2'-O-methylguanosine-3'-phosphate
  modified_base 17: mod_base = OTHER; note = 2'-O-methylcytidine-3'-phosphate
  modified_base 18: mod_base = OTHER; note = 2'-O-methylguanosine-3'-phosphate
  modified_base 19: mod_base = OTHER; note = 2'-O-methyluridine-3'-phosphorothioate
  modified_base 20: mod_base = OTHER; note = 2'-O-methylguanosine-3'-phosphorothioate
  modified_base 21: mod_base = OTHER; note = 2'-O-methyladenosine
ttaagatgatggagcgcgtga

SEQ ID NO: 661 - RNA, 23 nt, synthetic construct
  source 1..23: mol_type = other RNA
  modified_base 1: mod_base = OTHER; note = 2'-O-methyluridine-3'-phosphorothioate 5'-(E)-Vinylphosphonate
  modified_base 2: mod_base = OTHER; note = 2'-deoxy-2'-fluorocytidine-3'-phosphorothioate
  modified_base 3: mod_base = OTHER; note = 2'-O-methyladenosine-3'-phosphate
  modified_base 4: mod_base = OTHER; note = 2'-O-methylcytidine-3'-phosphate
  modified_base 5: mod_base = OTHER; note = 2'-O-methylguanosine-3'-phosphate
  modified_base 6: mod_base = OTHER; note = 2'-deoxy-2'-fluorocytidine-3'-phosphate
  modified_base 7: mod_base = OTHER; note = 2'-O-methylguanosine-3'-phosphate
  modified_base 8: mod_base = OTHER; note = 2'-deoxy-2'-fluorocytidine-3'-phosphate
  modified_base 9: mod_base = OTHER; note = 2'-deoxy-2'-fluorouridine-3'-phosphate
  modified_base 10: mod_base = OTHER; note = 2'-O-methylcytidine-3'-phosphate
  modified_base 11: mod_base = OTHER; note = 2'-O-methylcytidine-3'-phosphate
  modified_base 12: mod_base = OTHER; note = 2'-O-methyladenosine-3'-phosphate
  modified_base 13: mod_base = OTHER; note = 2'-O-methyluridine-3'-phosphate
  modified_base 14: mod_base = OTHER; note = 2'-deoxy-2'-fluorocytidine-3'-phosphate
  modified_base 15: mod_base = OTHER; note = 2'-O-methyladenosine-3'-phosphate
  modified_base 16: mod_base = OTHER; note = 2'-deoxy-2'-fluorouridine-3'-phosphate
  modified_base 17: mod_base = OTHER; note = 2'-O-methylcytidine-3'-phosphate
  modified_base 18: mod_base = OTHER; note = 2'-O-methyluridine-3'-phosphate
  modified_base 19: mod_base = OTHER; note = 2'-O-methyluridine-3'-phosphate
  modified_base 20: mod_base = OTHER; note = 2'-O-methyladenosine-3'-phosphate
  modified_base 21: mod_base = OTHER; note = 2'-O-methyladenosine-3'-phosphorothioate
  modified_base 22: mod_base = OTHER; note = 2'-O-methylcytidine-3'-phosphorothioate
  modified_base 23: mod_base = OTHER; note = 2'-O-methylguanosine
tcacgcgctccatcatcttaacg

SEQ ID NO: 662 - RNA, 23 nt, synthetic construct
  source 1..23: mol_type = other RNA
cgttaagatgatggagcgcgtgg
